(19) United States
(12) Patent Application Publication
(10) Pub. No.: US 2013/0203096 A1
(43) Pub. Date: Aug. 8, 2013

(54) Selected Reaction Monitoring Assays

(71) Applicant: Integrated Diagnostics, Inc., Seattle, WA (US)

(72) Inventors: Paul Edward Kearney, Montreal (CA); Xiao-Jun Li, Bellevue, WA (US); Clive Hayward, Seattle, WA (US); Miguel Dominguez Geeraerts, Pierrefonds (CA)

(73) Assignee: INTEGRATED DIAGNOSTICS, INC., Seattle, WA (US)

(21) Appl. No.: 13/725,098

(22) Filed: Dec. 21, 2012

Related U.S. Application Data
(60) Provisional application No. 61/578,718, filed on Dec. 21, 2011.
(60) Provisional application No. 61/614,818, filed on Mar. 23, 2012.

(51) Int. Cl. G01N 27/62

(52) U.S. Cl. CPC G01N 27/62
USPC 435/23

(57) ABSTRACT

Provided herein are methods for developing selected reaction monitoring mass spectrometry (LC-SRM-MS) assays.

### RELATED APPLICATIONS

[0001] This application claims priority and benefit of U.S. Provisional Application No. 61/578,718 filed Dec. 21, 2011, and U.S. Provisional Application No. 61/614,818 filed Mar. 23, 2012, the contents of each of which are incorporated herein by reference in their entireties.

### INCORPORATION-BY-REFERENCE OF SEQUENCE LISTING

[0002] The contents of the text file named “44549-504001US_ST25.txt”, which was created on Feb. 27, 2013 and is 1,147,839 bytes in size, are hereby incorporated by reference in their entireties.

### BACKGROUND

[0003] Liquid Chromatography Selected Reaction Monitoring Mass Spectrometry (LC-SRM-MS) has emerged as an alternative technology to immunoassays for quantification of target proteins in biological samples. LC-SRM-MS methods are highly desirable because LC-SRM-MS methods provide both absolute structural specificity for the target protein and relative or absolute measurement of the target protein concentration when suitable internal standards are utilized. In contrast to immunoassays, LC-SRM-MS does not involve the manufacturing of biologics. LC-SRM-MS protein assays can be rapidly and inexpensively developed in contrast to the development of immunoassays. LC-SRM-MS are highly multiplexed, with simultaneous assays for hundreds of proteins performed in a single sample analysis. Using LC-SRM-MS in contrast to other proteomic technologies allows for complex assays for the identification diagnostic proteins in complex diseases such as cancer, autoimmune, and metabolic disease. In particular, the development of a highly multiplexed LC-SRM-MS assay that reproducibly identifies a specific set of proteins relevant to a clinical disease presents diagnostic advantages and efficiencies. To date, proteomic techniques have not enabled such inventions to exist where hundreds of proteins can be accurately quantified within a single sample. The present invention provides accurate measurement of hundreds of lung cancer associated proteins within a single sample using multiplexed techniques.

### SUMMARY OF THE INVENTION

[0004] The present invention comprises a LC-SRM-MS assay for the measurement proteins in a single sample and in a single LC-SRM-MS assay. The assay was optimized for protein quantification and minimal interference among proteins in the assay. This LC-SRM-MS assay is novel because measurement of a large number of proteins in a single sample specifically associated with lung cancer has not been accomplished. Simultaneous measurement of such a large number of proteins without interference among the proteins requires specific techniques to distinguish among the proteins. The current invention provides clinical utility as this assay was used for development of lung cancer diagnostic tests for the early detection of lung cancer, managing disease treatment, as well as testing for disease recurrence.

[0005] The object of the present invention is to provide improved methods for the use of LC-SRM-MS in the development of assays. Accordingly, provided herein is a method for developing peptides and transitions for a plurality of at least 200 proteins for a single sample selected reaction monitoring mass spectrometry (LC-SRM-MS) assay, including the steps of providing a set of 200 or more proteins; generating transitions for each protein; assessing LC-SRM-MS data by Mascot score; performing collision energy optimization on the transitions; selecting peptides with transitions showing the greatest peak areas of their transitions; selecting a set of transitions for each peptide, wherein the transitions for each peptide have one of the four most intense b or y transition ions; the transitions for each peptide have m/z values of at least 30 m/z above or below those of the precursor ion; the transitions for each peptide do not interfere with transitions from other peptides; and the transitions represent transitions due to breakage of peptide bond at different sites of the protein.

[0006] In one embodiment of the method, each selected peptide in the set of peptides has a monoisotopic mass of 700-5000 Da; and does not contain a cysteine or a methionine; or may contain cysteine or methionine. In another embodiment, the transitions for each peptide have one of the four most intense b or y transition ions; have m/z values of at least 30 m/z above or below those of a precursor ion; do not interfere with transitions from other peptides; and represent transitions due to breakage of peptide bond at different sites of the protein.

[0007] In another embodiment of the method, the peptides do not include any peptide that is bounded by KK, KR, RK or RR (either upstream or downstream) in the corresponding protein sequence. Specifically, the amino acid is charged at pH 7.0. These amino acids include arginine and lysine. In another embodiment, each peptide of said set of peptides is unique to the corresponding protein. In yet another embodiment, the peptides do not include peptides which were observed in post-translational modified forms. In still another embodiment, each set of peptides is prioritized according to one or more of the following ordered set of criteria: unique peptides first, then non-unique; peptides with no observed post-translational modifications first, then those observed with post-translational modifications; peptides within the mass range 800-3500 Da first, then those outside of 800-3500 Da; and sorted by decreasing number of variant residues. In certain embodiments, The peptides are unique in that they only appear once among the peptides run in a single assay.

[0008] In one embodiment, each set of peptides is prioritized according to all of the ordered set of criteria. In another embodiment, each prioritized set of peptides contains 1-5 peptides.

[0009] In certain embodiments of the preceding methods, the two best peptides per protein and the two best transitions per peptide are selected based on experimental data resulting from LC-SRM-MS analysis of one or more of the following experimental samples: a biological disease sample, a biological control sample, and a mixture of synthetic peptides of interest. In a particular embodiment, the biological disease and biological control samples are processed using an immunodepletion method prior to LC-SRM-MS analysis. In another embodiment, the experimental samples contain internal standard peptides. In yet another embodiment, the LC-SRM-MS analysis method specifies a maximum of 7000 transitions, including transitions of the internal standard peptides and transitions. In other embodiments the method specifies a maximum of between 1000-7000, 2000-6000, 3000-5000 and about 3500 transitions.

[0010] In one embodiment of the method, the top two transitions per peptide are selected ac cording to one or more of the following criteria the transitions exhibit the largest peak areas measured in either of the two biological experimental samples; the transitions are not interfered with by other ions; the transitions do not exhibit an elution profile that visually differs from those of other transitions of the same peptide; or the transitions are not beyond the detection limit of both of the two biological experimental samples.

[0011] In another embodiment of the method, the top two peptides per protein are selected according to one or more of the following criteria: one or more peptides exhibit two transitions and represent the largest combined peak areas of the two transitions; or one or more peptides exhibit one transition and represent the largest combined peak areas of the two transitions.

[0012] In another aspect, provided herein is an assay developed according to the foregoing method, and embodiments thereof.

[0013] In yet another aspect provided herein is the use of an assay developed according to the foregoing method, and embodiments thereof, to detect a plurality of at least 200 proteins in a single biological sample.

[0014] In another aspect, provided herein is an assay developed according to the foregoing method, and embodiments thereof.

[0015] The disclosure provides a composition comprising at least five transition ions selected from the listing of transition ions in Table 2. In one embodiment of the assay each transition ion independently corresponds to a unique protein. The five transition ions corresponded to proteins selected from the group consisting of LRP1, BGH3, COIA1, TETN, TSP1, ALDOA, GRP78, ISLR, FRIL, LG3BP, PRDX1, FIBA, and GSLG1. (see: U.S. application Ser. No. 13/306,823 PCT/US11/62461). The composition can further include an additional five transition ions selected from the listing of transition ions in Table 2. The additional five transition ions can corresponded to the proteins APOE, BASP1, CD14, FOXA2 and HSPB1.

[0016] The disclosure provides a composition comprising at least five synthetic peptides selected from the listing of peptides and proteins in Table 2. In one embodiment, each peptide can independently correspond to a unique protein. At least one of the peptides was isotopically labeled. The amount of each of the at least five synthetic peptides is known. In another embodiment, the composition included one or more polar solvents. The five synthetic peptides can correspond to the proteins LRP1, BGH3, COIA1, TETN, TSP1, ALDOA, GRP78, ISLR, FRIL, LG3BP, PRDX1, FIBA, and GSLG1. The composition can also include an additional five synthetic peptides selected from the listing of peptides and proteins in Table 2. The additional five synthetic peptides can correspond to the proteins APOE, BASP1, CD14, FOXA2 and HSPB1.

[0017] The disclosure provides a use of a composition, as described above, for the development of an assay to detect a disease, disorder or condition in a mammal.

[0018] The disclosure provides a method comprising analyzing a composition, as described above, using mass spectrometry. The method can use selected reaction monitoring mass spectrometry.

### BRIEF DESCRIPTION OF THE DRAWINGS

[0019] FIG. 1 depicts candidate protein cohort by source. 217 tissue proteins were identified using proteomics analysis. 319 proteins were identified by review of the literature. Between the two sources, there was an overlap of 148 proteins.

[0020] FIG. 2 is a bar diagram showing Pearson correlations for peptides from the same peptide, from the same protein and from different proteins.

### DETAILED DESCRIPTION OF THE INVENTION

[0021] The present disclosure relates to methods for developing peptides and transitions for a single sample selected reaction monitoring mass spectrometry (LC-SRM-MS) assay, generally comprising the steps of providing a set of proteins; identifying representative proteolytic peptides for each protein according to a set of criteria; identifying representative transitions for each peptide according to another set of criteria; and selecting the optimum peptides per protein and the optimum transitions per peptide.

[0022] Selected reaction monitoring mass spectrometry is capable of highly sensitive and accurate protein quantification based on the quantification of proteolytic peptides. In terms of clinical utility, mass spectrometry-based assays are often compared to immunoassays (e.g., Enzyme-Linked Immunosorbent Assay, or ELISA), which have the ability to quantify specific analytes in large sample sets (e.g., 96 or 384 samples in parallel microtitre plate-based format). Until recently, mass spectrometry-based protein assays were not able to match these sample sizes or quantitative accuracy. Considerable time and expense is required to generate and characterize antibodies required for immunoassays. Increasingly efficient LC-SRM-MS assays, therefore, may surpass immunoassays such as ELISA in the rapid development of clinically useful, multiplexed protein assays.

[0023] LC-SRM-MS is a highly selective method of tandem mass spectrometry which has the potential to effectively filter out all molecules and contaminants except the desired analyte(s). This is particularly beneficial if the analysis sample is a complex mixture which may comprise several isobaric species within a defined analytical window. LC-SRM-MS methods may utilize a triple quadrupole mass spectrometer which, as is known in the art, includes three quadrupole rod sets. A first stage of mass selection is performed in the first quadrupole rod set, and the selectively transmitted ions are fragmented in the second quadrupole rod set. The resultant transition (product) ions are conveyed to the third quadrupole rod set, which performs a second stage of mass selection. The product ions transmitted through the third quadrupole rod set are measured by a detector, which generates a signal representative of the numbers of selectively transmitted product ions. The RF and DC potentials applied to the first and third quadrupoles are tuned to select (respectively) precursor and product ions that have m/z values lying within narrow specified ranges. By specifying the appropriate transitions (m/z values of precursor and product ions), a peptide corresponding to a targeted protein may be measured with high degrees of sensitivity and selectivity. Signal-to-noise ratio in LC-SRM-MS is often superior to conventional tandem mass spectrometry (MS/MS) experiments that do not selectively target (filter) particular analytes but rather aim to survey all analytes in the sample.

[0024] Accordingly, provided herein is a method for developing peptides and transitions for a plurality of proteins for use in selected reaction monitoring mass spectrometry (LC-SRM-MS) assay. In a preferred embodiment, the assay involves the analysis of a single sample containing all analytes of interest (e.g., a proteolytic digest of plasma proteins). As to the selection of the protease(s) used, trypsin, which cleaves exclusively C-terminal to arginine and lysine residues, is a preferred choice to generate peptides because the masses of generated peptides are compatible with the detection ability of most mass spectrometers (up to 2000 m/z), the number and average length of generated peptides, and also the availability of efficient algorithms for the generation of databases of theoretical trypsin-generated peptides. High cleavage specificity, availability, and cost are other advantages of trypsin. Other suitable proteases will be known to those of skill in the art. Miscleavage is a factor for failure or ambiguous protein identification. A miscleavage can be defined as partial enzymatic protein cleavages generating peptides with internal missed cleavage sites reflecting the allowed number of sites (targeted amino acids) per peptide that were not cut. The presence of post-translational modifications (PTMs) is also a potential contributor to the problem of miscleavages.

[0025] LC-SRM-MS mass spectrometry involves the fragmentation of gas phase ions and occurs between the different stages of mass analysis. There are many methods used to fragment the ions and these can result in different types of fragmentation and thus different information about the structure and composition of the molecule. The transition ions observed in an LC-SRM-MS spectrum result from several different factors, which include, but are not limited to, the primary sequence, the amount of internal energy, the means of introducing the energy, and charge state. Transitions must carry at least one charge to be detected. An ion is categorized as either a, b or c if the charge is on a transition comprising the original N terminus of the peptide, whereas the ion is categorized as either x, y or z if the charge is on a transition comprising the original C terminus of the peptide. A subscript indicates the number of residues in the transition (e.g., one peptide residue in x₁, two peptide residues in y₂, and three peptide residues in z₃, etc.).

[0026] In a generic peptide repeat unit represented —N—C(O)—C—, an x ion and an a ion resulting from cleavage of the carbonyl-carbon bond (i.e., C(O)—C). The x ion is an acylium ion, and the a ion is an iminium ion. A y ion and a b ion result from cleavage of the carbonyl-nitrogen bond (i.e., C(O)—N, also known as the amide bond). In this case, the y ion is an ammonium ion and the b ion is an acylium ion. Finally, a z ion and a c ion result from cleavage of the nitrogen-carbon (i.e., C—N) bond. The z ion is a carbocation and the c ion is an ammonium ion.

[0027] Superscripts are sometimes used to indicate neutral losses in addition to the backbone fragmentation, for example, * for loss of ammonia and ^{∘} for loss of water. In addition to protons, c ions and y ions may abstract an additional proton from the precursor peptide. In electrospray ionization, tryptic peptides may carry more than one charge.

[0028] Internal transitions arise from double backbone cleavage. These may be formed by a combination of b-type and y-type cleavage (i.e., cleavage producing b and y ions). Internal cleavage ions may also be formed by a combination of a-type and y-type cleavage. An internal transition with a single side chain formed by a combination of a-type and y-type cleavage is called an iminium ion (sometimes also referred to as an imonium or immonium ion). These ions are labeled with the one letter code for the corresponding amino acid.

[0029] Low energy CID (i.e., collision induced dissociation in a triple quadrupole or an ion trap) involves the fragmentation of a peptide carrying a positive charge, primarily along its backbone, to generate primarily a, b and y ions.

[0030] In one aspect, provided herein is a method for developing peptides and transitions for a plurality of proteins for a single sample selected reaction monitoring mass spectrometry (LC-SRM-MS) assay, by: (a) providing a panel of a plurality of proteins; (b) identifying a set of peptides for each protein, wherein (i) each peptide in the set of peptides corresponds to a transition of said protein; (ii) the peptides have a monoisotopic mass of 700-5000 Da; and (iii) the peptides do not contain a cysteine or a methionine; or may contain cysteine or methionine; (c) identifying a set of transitions for each peptide, wherein (i) the transitions for each peptide have one of the four most intense b or y transition ions; (ii) the transitions for each peptide have m/z values of at least 30 m/z above or below those of the precursor ion; (iii) the transitions for each peptide do not interfere with transitions from other peptides; and (iv) the transitions represent transitions due to breakage of peptide bond at different sites of the protein; and (d) selecting the peptides for each protein that best fit the criteria of step (b) and the transitions per peptide that best fit the criteria of step (c); thereby developing peptides and transitions for a LC-SRM-MS assay.

[0031] By plurality of proteins it is meant at least 2, 3, 4, 5, 6, 7, 8, 9, 10, 15, 20, 25, 50, 100, 150, 200, 250, 300, 350, 400, 450, 500 or more In certain embodiments, the plurality of proteins can encompass between 2 and 10. 10 and 20, 20 and 50, 50 and 100, 100 and 200, or 200 and 500 proteins. In other embodiments, the plurality of proteins can encompass between 25° and 450; or 300 and 400 proteins.

[0032] Trypsin-like proteases cleave peptide bonds following a positively charged amino acid (e.g., lysine (K) or arginine (R)). This specificity is driven by the residue which lies at the base of the enzyme's Si pocket (generally a negatively charged aspartic acid or glutamic acid). Accordingly, in one embodiment of the method, the peptides do not include any peptide that is bounded by KK, KR, RK or RR, either upstream of downstream in the corresponding protein sequence. In another embodiment, each peptide of said set of peptides is unique to the corresponding protein.

[0033] Post-translational modification (PTM) is the chemical modification of a protein after its translation. It can include any modification following translation, including cleavage. It is one of the later steps in protein biosynthesis, and thus gene expression, for many proteins. It is desirable to avoid such peptides for the purpose of protein identification. Thus, in another embodiment, the peptides do not include peptides which were observed in post-translational modified forms.

[0034] In still another embodiment, each set of peptides is prioritized according to one or more of the following ordered set of criteria: (a) unique peptides first, then non-unique; (b) peptides with no observed post-translational modifications first, then those observed with post-translational modifications; (c) peptides within the mass range 800-3500 Da first, then those outside of 800-3500 Da; and (d) sorted by decreasing number of variant residues. In one embodiment, each set of peptides is prioritized according to all of the ordered set of criteria. In another embodiment, each prioritized set of peptides contains 1-5 peptides.

[0035] In certain embodiments, one or more liquid chromatography (LC) purification steps are performed prior to a subsequent LC-SRM-MS analysis step. Traditional LC analysis relies on the chemical interactions between sample components and column packing materials, where laminar flow of the sample through the column is the basis for separation of the analyte of interest from the test sample. The skilled artisan will understand that separation in such columns is a diffusional process. A variety of column packing materials are available for chromatographic separation of samples, and selection of an appropriate separation protocol is an empirical process that depends on the sample characteristics, the analyte of interest, the interfering substances present and their characteristics, etc. Various packing chemistries can be used depending on the needs (e.g., structure, polarity, and solubility of compounds being purified). In various embodiments the columns are polar, ion exchange (both cation and anion), hydrophobic interaction, phenyl, C-2, C-8, C-18 columns, polar coating on porous polymer, or others that are commercially available. During chromatography, the separation of materials is effected by variables such as choice of eluant (also known as a “mobile phase”), choice of gradient elution and the gradient conditions, temperature, etc. In certain embodiments, an analyte may be purified by applying a sample to a column under conditions where the analyte of interest is reversibly retained by the column packing material, while one or more other materials are not retained. In these embodiments, a first mobile phase condition can be employed where the analyte of interest is retained by the column, and a second mobile phase condition can subsequently be employed to remove retained material from the column, once the non-retained materials are washed through. Alternatively, an analyte may be purified by applying a sample to a column under mobile phase conditions where the analyte of interest elutes at a differential rate in comparison to one or more other materials. As discussed above, such procedures may enrich the amount of one or more analytes of interest relative to one or more other components of the sample.

[0036] The following parameters are used to specify an LC-SRM-MS assay of a protein under a particular LC-SRM-MS system: (1) a tryptic peptide of the protein; (2) the retention time (RT) of the peptide; (3) the m/z value of the peptide precursor ion; (4) the declustering potential used to ionize the precursor ion; (5) the m/z value of a fragment ion generated from the peptide precursor ion; and (6) the collision energy (CE) used to fragment the peptide precursor ion that is optimized for the particular peptide.

[0037] In certain embodiments of the preceding methods, the two best peptides per protein and the two best transitions per peptide are selected based on experimental data resulting from LC-SRM-MS analysis of one or more of the following experimental samples: a biological disease sample, a biological control sample, and a mixture of synthetic peptides of interest. Biological samples include body fluids, tissue samples and cell samples. Body fluid samples can include blood, serum, sputum, genital secretions, cerebrospinal fluid, sweat or excreta such as urine. Body tissue samples can include lung, skin, brain, spine, bone, muscle, epithelial, liver, kidney, pancreas, gastrointestinal tract, cardiovascular tissue, heart or nervous tissue. Biological disease samples can include cancer, benign tumors, infected tissue and tissue subject to trauma. In a particular embodiment, the biological disease and biological control samples are processed using an immunodepletion method prior to LC-SRM-MS analysis. Immunodepletion involves removal of one or more proteins through the use of antibodies. Numerous immunodepletion techniques are known to those of skill in the art. In another embodiment, the biological disease and biological control samples are processed using an immunocapture method prior to LC-SRM-MS analysis. Immunocapture involves selection of one or more proteins through the use of antibodies. Numerous immunocapture techniques are known to those of skill in the art.

[0038] To facilitate accurate quantification of the peptide transitions by the methods disclosed herein, a set of isotopically-labeled synthetic versions of the peptides of interest may be added in known amounts to the sample for use as internal standards. Since the isotopically-labeled peptides have physical and chemical properties identical to the corresponding surrogate peptide, they co-elute from the chromatographic column and are easily identifiable on the resultant mass spectrum. The addition of the labeled standards may occur before or after proteolytic digestion. Methods of synthesizing isotopically-labeled peptides will be known to those of skill in the art. Thus, in another embodiment, the experimental samples contain internal standard peptides. Other embodiments may utilize external standards or other expedients for peptide quantification.

[0039] In yet another embodiment, the LC-SRM-MS analysis method specifies a maximum of 7000 transitions, including transitions of the internal standard peptides and transitions. As used herein, the term “transition” refers to the specific pair of m/z (mass-to-charge) values associated with the precursor and transition ions corresponding to a specific peptide and, therefore, to a specific protein.

[0040] In one embodiment of the method, the top two transitions per peptide are selected according to one or more of the following criteria (A): (1) the transitions exhibit the largest peak areas measured in either of the two biological experimental samples; (2) the transitions are not interfered with by other ions; (3) the transitions do not exhibit an elution profile that visually differs from those of other transitions of the same peptide; (4) the transitions are not beyond the detection limit of both of the two biological experimental samples; (5) the transitions do not exhibit interferences.

[0041] For the mass spectrometric analysis of a particular peptide, the quantities of the peptide transitions in the sample may be determined by integration of the relevant mass spectral peak areas, as known in the prior art. When isotopically-labeled internal standards are used, as described above, the quantities of the peptide transitions of interest are established via an empirically-derived or predicted relationship between peptide transition quantity (which may be expressed as concentration) and the area ratio of the peptide transition and internal standard peaks at specified transitions.

[0042] In another embodiment of the method, the top two peptides per protein are selected according to one or more of the following criteria (B): (1) one or more peptides exhibit two transitions according to criteria (A) and represent the largest combined peak areas of the two transitions according to criteria (A); and (2) one or more peptides exhibit one transition according to criteria (A) and represent the largest combined peak areas of the two transitions according to criteria (A).

### Assays

[0043] The methods of the present disclosure allow the quantification of high abundance and low abundance plasma proteins that serve as detectable markers for various health states (including diseases and disorders), thus forming the basis for assays that can be used to determine the differences between normal levels of detectable markers and changes of such detectable markers that are indicative of changes in health status. In one aspect of the invention, provided herein is an assay developed according to the foregoing method, and embodiments thereof. In another aspect, provided herein is the use of an assay developed according to the foregoing method, and embodiments thereof, to detect a plurality of at least 200, 300, or more proteins in a single sample. In a merely illustration embodiment, 388 proteins in the following table 1 are detected utilizing the method of present invention.

[0044] Of the 388 proteins, the 36 most cooperative proteins are listed in Table 2.

[0045] SRM assays for the 388 proteins were developed using standard synthetic peptide techniques. Of the 388 candidates, SRM assays were successfully developed for 371 candidates. The 371 SRM assays were applied to benign and lung cancer plasma samples to evaluate detection rate in blood. The summary of the SRM assay for these 371 proteins is listed in table 3 (see also Example III).

### DEFINITIONS

[0046] As used herein, “transition” refers to a pair of m/z values associated with a peptide. Normally, labeled synthetic peptides are used as quality controls in SRM assays. However, for very large SRM assays such as the 371 protein lung cancer assay, labeled peptides are not feasible. However, correlation techniques (Kearney, Butler et al. 2008) were used to confirm the identity of protein transitions with high confidence. In FIG. 2 a histogram of the Pearson correlations between every pair of transitions in the assay is presented. The correlation between a pair of transitions is obtained from their expression profiles over all samples (143) in the training study detailed below. As expected, transitions from the same peptide are highly correlated. Similarly, transitions from different peptide fragments of the same protein are also highly correlated. In contrast, transitions from different proteins are not highly correlated. This methodology enables a statistical analysis of the quality of a protein's SRM assay. For example, if the correlation of transitions from two peptides from the same protein is above 0.5 then there is less than a 5% probability that the assay is false.

[0047] As used herein, a “tryptic peptide” refers to the peptide that is formed by the treatment of a protein with trypsin.

[0048] As used herein, “RT” refers to “retention time”, the elapsed time between injection and elution of an analyte.

[0049] As used herein, “m/z” indicates the mass-to-charge ratio of an ion.

[0050] As used herein, “DP” refers to “declustering potential”, a voltage potential to dissolvate and dissociate ion clusters. It is also known as “fragmentor voltage” or “ion transfer capillary offset voltage” depending on the manufacture.

[0051] As used herein, “CE” refers to “collision energy”, the amount of energy precursor ions receive as they are accelerated into the collision cell.

[0052] As used herein, “LC-SRM-MS” is an acronym for “selected reaction monitoring” and may be used interchangeably with “LC-MRM-MS”.

[0053] As used herein, “MS/MS” represents tandem mass spectrometry, which is a type of mass spectrometry involving multiple stages of mass analysis with some form of fragmentation occurring in between the stages.

[0054] As used herein, “ISP” refers to “internal standard peptides”.

[0055] As used herein, “HGS” refers to “human gold standard”, which is comprised of a pool of plasma from healthy individuals.

[0056] As used herein, “MGF” refers to “Mascot generic file”. Mascot is a search engine that uses mass spectrometry data to identify proteins from primary sequence databases. A Mascot generic file is a plain text (ASCII) file containing peak list information and, optionally, search parameters.

[0057] Mascot is a web-based tool for deriving protein sequences from mass spectrometry data. This data can be acquired from any mass spectrometry technique including MALDI-TOF and MS/MS (including LC-SRM-MS) data. Mascot uses a ‘probability-based MOWSE’ algorithm to estimate the significance of a match (i.e., that the observed transitions correspond to a particular protein). The total score is the absolute probability that the observed match is a random event. They are reported as −10×LOG 10(P), where P is the absolute probability. Lower probabilities, therefore, are reported as higher scores. For example, if the absolute probability that an observed match is random is 1×10⁻¹², Mascot reports it as 120.

[0058] The disclosure also provides compositions. These compositions can include any of the transition ions described in Table 2. These transition ions exist while peptides derived from the proteins in Table 2 are undergoing analysis with LC-SRM-MS. In one embodiment, the composition includes any of the transition ions described in Table 2. In another embodiment, the composition includes any two transition ions described in Table 2. In other embodiments, the composition includes, any 3, 4, 5, 6, 7, 8, 9, 10, 11, 12, 13, 14, 15, 16, 17, 18, 19, 20, 25, 30, 35, 40, 45, 50, 55, 60, 65, 70, 75, 80, 85, 90, 95, 100, 110, 120, 130, 140, 150, 160, 170, 180, 190, 200, 210, 220, 230, 240, 250, 260, 270, 280, 290, 300 or 331 transition ions described in Table 2.

[0059] In another embodiment, the transition ions correspond with human proteins including LRP1, BGH3, COIA1, TETN, TSP1, ALDOA, GRP78, ISLR, FRIL, LG3BP, PRDX1, FIBA, and GSLG1. In another embodiment, the transition ions are derived from human proteins including LRP1, BGH3, COIA1, TETN, TSP1, ALDOA, GRP78, ISLR, FRIL, LG3BP, PRDX1, FIBA; and GSLG1. These proteins can further include transition ions corresponding with and/or derived from any number of additional proteins from Table 2. Thus, the composition can include, any additional 1, 2, 3, 4, 5, 6, 7, 8, 9, 10, 11, 12, 13, 14, 15, 16, 17, 18, 19, 20, 25, 30, 35, 40, 45, 50, 55, 60, 65, 70, 75, 80, 85, 90, 95, 100, 110, 120, 130, 140, 150, 160, 170, 180, 190, 200, 210, 220, 230, 240, 250, 260, 270, 280, 290, 300 or 331 transition ions described in Table 2.

[0060] In another embodiment, each of the transition ions in the composition corresponds and/or is derived from a different protein. In another embodiment, 90% of the transition ions in the composition correspond with and/or are derived from a protein that no other transition ion in the composition corresponds. In other embodiments, 80, 70, 60, 50, 40, 30, 20, 10 or 0% of the transition ions in the composition correspond and/or are derived from a protein that no other transition ion in the composition corresponds.

[0061] The compositions described herein included synthetic peptides. Synthetic peptides can be used as controls for the abundance of proteins they are derived from and/or correspond. In certain embodiments, the abundance of the synthetic peptides is defined and the results are compared to LC-SRM-MS results from a peptide found in a sample to the LC-SRM-MS results in the corresponding synthetic peptide. This allows for the calculation of the abundance of the peptide in the sample. In certain embodiments, by knowing the abundance of a peptide in a sample, the abundance of the protein it corresponded to is determined.

[0062] Synthetic peptides can be generated using any method known in the art. These methods can include recombinant expression techniques such as expression in bacteria or in vitro expression in eukaryotic cell lysate. These methods can also include solid phase synthesis.

[0063] In one embodiment, the composition includes synthetic peptides selected from any of the peptides described in Table 2. In another embodiment, the composition included any two peptides described in Table 2. In other embodiments, the composition included, any 3, 4, 5, 6, 7, 8, 9, 10, 11, 12, 13, 14, 15, 16, 17, 18, 19, 20, 25, 30, 35, 40, 45, 50, 55, 60, 65, 70, 75, 80, 85, 90, 95, 100, 110, 120, 130, 140, 150, 160, 170, 180, 190, 200, 210, 220, 230, 240, 250, 260, 270, 280, 290, 300 or more peptides described in Table 2.

[0064] In another embodiment, the peptides corresponded with human genes including LRP1, BGH3, COIA1, TETN, TSP1, ALDOA, GRP78, ISLR, FRIL, LG3BP, PRDX1, FIBA, and GSLG1 as described in corresponding patent application. These genes can further include peptides corresponding with any number of additional genes from Table 2. Thus, the composition can include, any additional 1, 2, 3, 4, 5, 6, 7, 8, 9, 10, 11, 12, 13, 14, 15, 16, 17, 18, 19, 20, 25, 30, 35, 40, 45, 50, 55, 60, 65, 70, 75, 80, 85, 90, 95, 100, 110, 120, 130, 140, 150, 160, 170, 180, 190, 200, 210, 220, 230, 240, 250, 260, 270, 280, 290, 300 or more peptides described in Table 2.

[0065] In another embodiment, each of the peptides in the composition each corresponds with a different protein. In another embodiment, 90% of the peptides in the composition correspond with a protein that no other peptide in the composition corresponds with. In other embodiments, 80, 70, 60, 50, 40, 30, 20, 10 or 0% of the peptides in the composition correspond with from a protein that no other peptide in the composition corresponds with.

[0066] The peptides can be isotopically labeled. The isotopes with which they can be labeled include ¹³C, ²H, ¹⁵N and ¹⁸O. The peptides can also include a polar solvent. Polar solvents can include water and mixtures of ethanol and water.

[0067] In certain embodiments, the samples described herein are taken from mammals. These mammals include rats, mice, rabbits, dogs, non-human primates and humans. Samples can be isolated from any tissue or organ or from any bodily fluid. Organs from which samples can be taken include skin, heart, lung, brain, kidney, liver, pancreas, spleen, testes, ovaries, gall bladder, thymus, thyroid, eye, ear, nose, mouth, tongue, penis, vagina, bladder or larynx. Tissues include nervous tissue, vascular tissue, muscle, bone, gastrointestinal tract, epithelial tissue, fibroblastic tissue, mucous membranes, hair, skin, reproductive tissue and connective tissue. Body fluids and excretions include, blood, serum, saliva, urine, semen, vaginal secretions, excrement, bile, tears, lymph, ear wax, mucous, shed skin, finger nails, toe nails, skin oils, sweat and dandruff.

[0068] The relative abundance of one or more of the proteins represented by the transition ions and synthetic peptides described above can be used to diagnose, determine likelihood of the presence of, develop prognoses for and/or stage various diseases and pathologies. Often the organ, tissue or bodily fluid or excretion from which the sample is taken is distinct from the organ, tissue or bodily fluid or excretion involved with the disease or pathology. For example, the presence of lung cancer can be determined from a sample taken from blood. Any type of body fluid may be used in the assays.

[0069] Diseases and pathologies that status, diagnosis, presence or prognosis can be found using the transition ions and/or synthetic peptides described herein include cancer, metabolic diseases, neurological disorders, infectious diseases and cardiovascular disorders.

### EXAMPLES

### Exemplary Standard Operating Procedure

### Protein Selection

[0070] Proteins known to be over-expressed on the cell surface of lung cancer tumors were obtained (through literature searching, experimental data or proprietary databases). This was referred to as set ‘A’. Proteins known to be over-secreted by lung cancer tumor cells were obtained (through literature searching, experimental data or proprietary databases). This was referred to as set ‘B’. Proteins associated with lung cancer in the literature were mined. This was referred to as set ‘C’. Proteins of interest (sets A, B and C are merged resulting in over 700 proteins) were assembled. The set of proteins was reduced to a set of 388 proteins (see Table 4) by prioritizing those proteins that have been previously detected my LC-MS/MS in blood (serum or plasma).

[0071] Selected proteins were then identified by their UniProt protein name and accession, their Entrez gene symbol and gene name, the isoform accession and their amino acid sequence. The canonical isoform in UniProt was selected if a protein has more than one isoform.

### Peptide Selection for Synthesis

[0072] The five best peptides per protein for LC-SRM-MS assay were selected for as follows. Fully tryptic peptides having a monoisotopic mass of 800-3500 mass units, without miscleavages, not containing a cysteine (C) or a methionine (M), without having high miscleavage probability were selected. Further, any peptide that was bounded by KK, KR, RK or RR (either upstream or downstream) in the corresponding protein sequence was not selected.

[0073] Peptides were selected that were unique to the protein of interest. Peptides were only selected that match only one protein or protein family including analogues of the one protein, when searched in protein databases. Further, peptides which were observed in post-translational modified forms were not selected. Databases were assessed that showed expression of the proteins from which the peptides were isolated in human blood. Also databases of good quality MS peptides were searched. Peptides that appeared in human blood and were good quality MS peptides were favored. If these methods did not result in a sufficient number of peptides, rules were relaxed in a step wise manner to allow a greater number of peptides until a sufficient number was reached. The purity of the synthesized peptides was >75% and the amount of material was ≧25 μg. Peptides did not need to be desalted.

[0074] The four best transitions per peptide are then selected and optimized based on experimental results from a mixture of synthetic peptides. LC-SRM-MS-triggered MS/MS spectra were acquired for each synthetic peptide, using a QTRAP 5500 instrument. One spectrum for the doubly- and one for the triply-charged precursor ion was collected for each peptide For the identified peptides (Mascot score ≧15), retention time was recorded for the four most intense b or y transition ions. The selected transition ions possessed m/z values were at least 30 m/z above or below those of the precursor ions; they did not interfere with other synthetic peptides; and they were transition ions due to breakage of peptide bond at different sites.

[0075] If an insufficient percentage of the synthetic peptides were acquired, the steps were repeated. In some cases, the second transition with first with theoretical y+ ions with m/z values at least 30 m/z above those of the doubly charged precursor ion was selected if an insufficient percentage was acquired. Peptides that failed to trigger the acquisition of MS/MS spectrum were discarded.

[0076] Collision energy (CE) for each selected transition (See Table 4) was optimized.

### Exemplary Protein List

[0077] The abundance of the following proteins can be assessed substantially simultaneously using the MS-LC-SRM-MS system described herein. Transitions from these proteins can be used to diagnose diseases including lung cancer when their abundance is measured in a biological specimen from a subject to be diagnosed for lung cancer. In one embodiment, the abundances of these proteins are measured in the blood serum of the subject.

TABLE 1

| | | | Sources of | | Subcellular | Evidence for |
|---|---|---|---|---|---|---|
| UniProt | Protein | Gene | Tissue | Biomarkers | Location | Presence in |
| Protein | Name | Symbol | Biomarkers | in Literature | (UniProt) | Blood |
| 1433B_HUMAN | 14-3-3 | YWHAB | Secreted, | LungCancers | Cytoplasm. | Literature, |
| | protein | | EPI | | Melanosome. | Detection |
| | beta/alpha | | | | Note = Identified | |
| | | | | | by mass | |
| | | | | | spectrometry in | |
| | | | | | melanosome | |
| | | | | | fractions from | |
| | | | | | stage I to stage | |
| | | | | | IV. | |
| 1433E_HUMAN | 14-3-3 | YWHAE | ENDO | LungCancers, | Cytoplasm (By | Literature, |
| | protein | | | BenignNodules | similarity). | Detection |
| | epsilon | | | | Melanosome. | |
| | | | | | Note = Identified | |
| | | | | | by mass | |
| | | | | | spectrometry in | |
| | | | | | melanosome | |
| | | | | | fractions from | |
| | | | | | stage I to stage | |
| | | | | | IV. | |
| 1433S_HUMAN | 14-3-3 | SFN | Secreted, | LungCancers | Cytoplasm. | UniProt, |
| | protein | | EPI | | Nucleus (By | Literature, |
| | sigma | | | | similarity). | Detection |
| | | | | | Secreted. | |
| | | | | | Note = May be | |
| | | | | | secreted by a | |
| | | | | | non-classical | |
| | | | | | secretory | |
| | | | | | pathway. | |
| 1433T_HUMAN | 14-3-3 | YWHAQ | EPI | LungCancers, | Cytoplasm. | Detection |
| | protein | | | BenignNodules | Note = In | |
| | theta | | | | neurons, | |
| | | | | | axonally | |
| | | | | | transported to | |
| | | | | | the nerve | |
| | | | | | terminals. | |
| 1433Z_HUMAN | 14-3-3 | YWHAZ | EPI | LungCancers, | Cytoplasm. | Detection |
| | protein | | | BenignNodules | Melanosome. | |
| | zeta/delta | | | | Note = Located | |
| | | | | | to stage I to | |
| | | | | | stage IV | |
| | | | | | melanosomes. | |
| 6PGD_HUMAN | 6- | PGD | EPI, ENDO | | Cytoplasm (By | Detection |
| | phosphogluconate | | | | similarity). | |
| | dehydrogenase, | | | | | |
| | decarboxylating | | | | | |
| A1AG1_HUMAN | Alpha-1- | ORM1 | EPI | Symptoms | Secreted. | UniProt, |
| | acid | | | | | Literature, |
| | glycoprotein 1 | | | | | Detection, |
| | | | | | | Prediction |
| ABCD1_HUMAN | ATP- | ABCD1 | ENDO | | Peroxisome | Detection, |
| | binding | | | | membrane; | Prediction |
| | cassette | | | | Multi-pass | |
| | sub-family | | | | membrane | |
| | D member 1 | | | | protein. | |
| ADA12_HUMAN | Disintegrin | ADAM12 | | LungCancers, | Isoform 1: Cell | UniProt, |
| | and | | | BenignNodules, | membrane; | Detection, |
| | metalloproteinase | | | Symptoms | Single-pass | Prediction |
| | domain- | | | | type I | |
| | containing | | | | membrane | |
| | protein 12 | | | | protein.\|Isoform | |
| | | | | | 2: | |
| | | | | | Secreted.\|Isoform | |
| | | | | | 3: Secreted | |
| | | | | | (Potential).\|Isoform | |
| | | | | | 4: Secreted | |
| | | | | | (Potential). | |
| ADML_HUMAN | ADM | ADM | | LungCancers, | Secreted. | UniProt, |
| | | | | BenignNodules, | | Literature, |
| | | | | Symptoms | | Detection, |
| | | | | | | Prediction |
| AGR2_HUMAN | Anterior | AGR2 | EPI | LungCancers | Secreted. | UniProt, |
| | gradient | | | | Endoplasmic | Prediction |
| | protein 2 | | | | reticulum (By | |
| | homolog | | | | similarity). | |
| AIFM1_HUMAN | Apoptosis- | AIFM1 | EPI, ENDO | LungCancers | Mitochondrion | Detection, |
| | inducing | | | | intermembrane | Prediction |
| | factor 1, | | | | space. Nucleus. | |
| | mitochondrial | | | | Note = Translocated | |
| | | | | | to the | |
| | | | | | nucleus upon | |
| | | | | | induction of | |
| | | | | | apoptosis. | |
| ALDOA_HUMAN | Fructose- | ALDOA | Secreted, | LungCancers, | | Literature, |
| | bisphosphate | | EPI | Symptoms | | Detection |
| | aldolase A | | | | | |
| AMPN_HUMAN | Aminopeptidase N | ANPEP | EPI, ENDO | LungCancers, | Cell membrane; | UniProt, |
| | | | | BenignNodules, | Single-pass | Detection |
| | | | | Symptoms | type II | |
| | | | | | membrane | |
| | | | | | protein. | |
| | | | | | Cytoplasm, | |
| | | | | | cytosol | |
| | | | | | (Potential). | |
| | | | | | Note = A soluble | |
| | | | | | form has also | |
| | | | | | been detected. | |
| ANGP1_HUMAN | Angiopoietin-1 | ANGPT1 | | LungCancers, | Secreted. | UniProt, |
| | | | | BenignNodules | | Literature, |
| | | | | | | Prediction |
| ANGP2_HUMAN | Angiopoietin-2 | ANGPT2 | | LungCancers, | Secreted. | UniProt, |
| | | | | BenignNodules | | Literature, |
| | | | | | | Prediction |
| APOA1_HUMAN | Apolipoprotein | APOA1 | | LungCancers, | Secreted. | UniProt, |
| | A-I | | | BenignNodules, | | Literature, |
| | | | | Symptoms | | Detection, |
| | | | | | | Prediction |
| APOE_HUMAN | Apolipoprotein E | APOE | EPI, ENDO | LungCancers, | Secreted. | UniProt, |
| | | | | BenignNodules, | | Literature, |
| | | | | Symptoms | | Detection, |
| | | | | | | Prediction |
| ASM3B_HUMAN | Acid | SMPDL3B | EPI, ENDO | | Secreted (By | UniProt, |
| | sphingomyelinase- | | | | similarity). | Prediction |
| | like | | | | | |
| | phosphodiesterase | | | | | |
| | 3b | | | | | |
| AT2A2_HUMAN | Sarcoplasmic/ | ATP2A2 | EPI, ENDO | LungCancers, | Endoplasmic | Detection |
| | endoplasmic | | | BenignNodules | reticulum | |
| | reticulum | | | | membrane; | |
| | calcium | | | | Multi-pass | |
| | ATPase 2 | | | | membrane | |
| | | | | | protein. | |
| | | | | | Sarcoplasmic | |
| | | | | | reticulum | |
| | | | | | membrane; | |
| | | | | | Multi-pass | |
| | | | | | membrane | |
| | | | | | protein. | |
| ATS1_HUMAN | A | ADAMTS1 | | LungCancers, | Secreted, | UniProt, |
| | disintegrin | | | BenignNodules, | extracellular | Literature, |
| | and | | | Symptoms | space, | Prediction |
| | metalloproteinase | | | | extracellular | |
| | with | | | | matrix (By | |
| | thrombospondin | | | | similarity). | |
| | motifs 1 | | | | | |
| ATS12_HUMAN | A | ADAMTS12 | | LungCancers | Secreted, | UniProt, |
| | disintegrin | | | | extracellular | Detection, |
| | and | | | | space, | Prediction |
| | metalloproteinase | | | | extracellular | |
| | with | | | | matrix (By | |
| | thrombospondin | | | | similarity). | |
| | motifs 12 | | | | | |
| ATS19_HUMAN | A | ADAMTS19 | | LungCancers | Secreted, | UniProt, |
| | disintegrin | | | | extracellular | Prediction |
| | and | | | | space, | |
| | metalloproteinase | | | | extracellular | |
| | with | | | | matrix (By | |
| | thrombospondin | | | | similarity). | |
| | motifs 19 | | | | | |
| BAGE1_HUMAN | B | BAGE | | LungCancers | Secreted | UniProt, |
| | melanoma | | | | (Potential). | Prediction |
| | antigen 1 | | | | | |
| BAGE2_HUMAN | B | BAGE2 | | LungCancers | Secreted | UniProt, |
| | melanoma | | | | (Potential). | Prediction |
| | antigen 2 | | | | | |
| BAGE3_HUMAN | B | BAGE3 | | LungCancers | Secreted | UniProt, |
| | melanoma | | | | (Potential). | Prediction |
| | antigen 3 | | | | | |
| BAGE4_HUMAN | B | BAGE4 | | LungCancers | Secreted | UniProt, |
| | melanoma | | | | (Potential). | Prediction |
| | antigen 4 | | | | | |
| BAGE5_HUMAN | B | BAGE5 | | LungCancers | Secreted | UniProt, |
| | melanoma | | | | (Potential). | Prediction |
| | antigen 5 | | | | | |
| BASP1_HUMAN | Brain acid | BASP1 | Secreted, | | Cell membrane; | Detection |
| | soluble | | EPI | | Lipid-anchor. | |
| | protein 1 | | | | Cell projection, | |
| | | | | | growth cone. | |
| | | | | | Note = Associated | |
| | | | | | with the | |
| | | | | | membranes of | |
| | | | | | growth cones | |
| | | | | | that form the | |
| | | | | | tips of | |
| | | | | | elongating | |
| | | | | | axons. | |
| BAX_HUMAN | Apoptosis | BAX | EPI | LungCancers, | Isoform Alpha: UniProt, | |
| | regulator | | | BenignNodules | Mitochondrion | Literature, |
| | BAX | | | | membrane; | Prediction |
| | | | | | Single-pass | |
| | | | | | membrane | |
| | | | | | protein. | |
| | | | | | Cytoplasm. | |
| | | | | | Note = Colocalizes | |
| | | | | | with 14-3-3 | |
| | | | | | proteins in the | |
| | | | | | cytoplasm. | |
| | | | | | Under stress | |
| | | | | | conditions, | |
| | | | | | redistributes to | |
| | | | | | the | |
| | | | | | mitochondrion | |
| | | | | | membrane | |
| | | | | | through the | |
| | | | | | release from | |
| | | | | | JNK- | |
| | | | | | phosphorylated | |
| | | | | | 14-3-3 | |
| | | | | | proteins\|Isoform | |
| | | | | | Beta: | |
| | | | | | Cytoplasm.\|Isoform | |
| | | | | | Gamma: | |
| | | | | | Cytoplasm\|Isoform | |
| | | | | | Delta: | |
| | | | | | Cytoplasm | |
| | | | | | (Potential). | |
| BDNF_HUMAN | Brain- | BDNF | | BenignNodules, | Secreted. | UniProt, |
| | derived | | | Symptoms | | Literature, |
| | neurotrophic | | | | | Prediction |
| | factor | | | | | |
| BGH3_HUMAN | Transforming | TGFBI | | LungCancers, | Secreted, | UniProt, |
| | growth | | | BenignNodules | extracellular | Detection |
| | factor-beta- | | | | space, | |
| | induced | | | | extracellular | |
| | protein ig- | | | | matrix. | |
| | h3 | | | | Note = May be | |
| | | | | | associated both | |
| | | | | | with | |
| | | | | | microfibrils and | |
| | | | | | with the cell | |
| | | | | | surface. | |
| BMP2_HUMAN | Bone | BMP2 | | LungCancers, | Secreted. | UniProt, |
| | morphogenetic | | | BenignNodules, | | Literature |
| | protein 2 | | | Symptoms | | |
| BST1_HUMAN | ADP- | BST1 | EPI | Symptoms | Cell membrane; | Detection, |
| | ribosyl | | | | Lipid-anchor, | Prediction |
| | cyclase 2 | | | | GPI-anchor. | |
| C163A_HUMAN | Scavenger | CD163 | EPI | Symptoms | Soluble CD163: | UniProt, |
| | receptor | | | | Secreted.\|Cell | Detection |
| | cysteine- | | | | membrane; | |
| | rich type 1 | | | | Single-pass | |
| | protein | | | | type I | |
| | M130 | | | | membrane | |
| | | | | | protein. | |
| | | | | | Note = Isoform 1 | |
| | | | | | and isoform 2 | |
| | | | | | show a lower | |
| | | | | | surface | |
| | | | | | expression | |
| | | | | | when expressed | |
| | | | | | in cells. | |
| C4BPA_HUMAN | C4b- | C4BPA | | LungCancers, | Secreted. | UniProt, |
| | binding | | | Symptoms | | Detection, |
| | protein | | | | | Prediction |
| | alpha chain | | | | | |
| CAH9_HUMAN | Carbonic | CA9 | | LungCancers, | Nucleus. | UniProt |
| | anhydrase 9 | | | BenignNodules, | Nucleus, | |
| | | | | Symptoms | nucleolus. Cell | |
| | | | | | membrane; | |
| | | | | | Single-pass | |
| | | | | | type I | |
| | | | | | membrane | |
| | | | | | protein. Cell | |
| | | | | | projection, | |
| | | | | | microvillus | |
| | | | | | membrane; | |
| | | | | | Single-pass | |
| | | | | | type I | |
| | | | | | membrane | |
| | | | | | protein. | |
| | | | | | Note = Found on | |
| | | | | | the surface | |
| | | | | | microvilli and | |
| | | | | | in the nucleus, | |
| | | | | | particularly in | |
| | | | | | nucleolus. | |
| CALR_HUMAN | Calreticulin | CALR | EPI | Symptoms | Endoplasmic | UniProt, |
| | | | | | reticulum | Literature, |
| | | | | | lumen. | Detection, |
| | | | | | Cytoplasm, | Prediction |
| | | | | | cytosol. | |
| | | | | | Secreted, | |
| | | | | | extracellular | |
| | | | | | space, | |
| | | | | | extracellular | |
| | | | | | matrix. Cell | |
| | | | | | surface. | |
| | | | | | Note = Also | |
| | | | | | found in cell | |
| | | | | | surface (T | |
| | | | | | cells), cytosol | |
| | | | | | and | |
| | | | | | extracellular | |
| | | | | | matrix. | |
| | | | | | Associated with | |
| | | | | | the lytic | |
| | | | | | granules in the | |
| | | | | | cytolytic T- | |
| | | | | | lymphocytes. | |
| CALU_HUMAN | Calumenin | CALU | EPI | Symptoms | Endoplasmic | UniProt, |
| | | | | | reticulum | Detection, |
| | | | | | lumen. | Prediction |
| | | | | | Secreted. | |
| | | | | | Melanosome. | |
| | | | | | Sarcoplasmic | |
| | | | | | reticulum | |
| | | | | | lumen (By | |
| | | | | | similarity). | |
| | | | | | Note = Identified | |
| | | | | | by mass | |
| | | | | | spectrometry in | |
| | | | | | melanosome | |
| | | | | | fractions from | |
| | | | | | stage I to stage | |
| | | | | | IV. | |
| CALX_HUMAN | Calnexin | CANX | Secreted, | BenignNodules | Endoplasmic | UniProt, |
| | | | EPI, ENDO | | reticulum | Literature, |
| | | | | | membrane; | Detection |
| | | | | | Single-pass | |
| | | | | | type I | |
| | | | | | membrane | |
| | | | | | protein. | |
| | | | | | Melanosome. | |
| | | | | | Note = Identified | |
| | | | | | by mass | |
| | | | | | spectrometry in | |
| | | | | | melanosome | |
| | | | | | fractions from | |
| | | | | | stage I to stage | |
| | | | | | IV. | |
| CAP7_HUMAN | Azurocidin | AZU1 | EPI | Symptoms | Cytoplasmic | Prediction |
| | | | | | granule. | |
| | | | | | Note = Cytoplasmic | |
| | | | | | granules of | |
| | | | | | neutrophils. | |
| CATB_HUMAN | Cathepsin B | CTSB | Secreted | LungCancers | Lysosome. | Literature, |
| | | | | | Melanosome. | Detection, |
| | | | | | Note = Identified | Prediction |
| | | | | | by mass | |
| | | | | | spectrometry in | |
| | | | | | melanosome | |
| | | | | | fractions from | |
| | | | | | stage I to stage | |
| | | | | | IV. | |
| CATG_HUMAN | Cathepsin G | CTSG | Secreted, | BenignNodules | Cell surface. | Detection, |
| | | | ENDO | | | Prediction |
| CBPB2_HUMAN | Carboxypeptidase | CPB2 | | LungCancers, | Secreted. | UniProt, |
| | B2 | | | BenignNodules, | | Detection, |
| | | | | Symptoms | | Prediction |
| CCL22_HUMAN | C-C motif | CCL22 | | LungCancers, | Secreted. | UniProt, |
| | chemokine | | | BenignNodules | | Prediction |
| | 22 | | | | | |
| CD14_HUMAN | Monocyte | CD14 | EPI | LungCancers, | Cell membrane; | Literature, |
| | differentiation | | | BenignNodules, | Lipid-anchor, | Detection, |
| | antigen | | | Symptoms | GPI-anchor. | Prediction |
| | CD14 | | | | | |
| CD24_HUMAN | Signal | CD24 | | LungCancers, | Cell membrane; | Literature |
| | transducer | | | BenignNodules | Lipid-anchor, | |
| | CD24 | | | | GPI-anchor. | |
| CD2A2_HUMAN | Cyclin- | CDKN2A | | LungCancers, | Cytoplasm. | Literature, |
| | dependent | | | BenignNodules | Nucleus.\|Nucleus, | Prediction |
| | kinase | | | | nucleolus | |
| | inhibitor | | | | (By similarity). | |
| | 2A, | | | | | |
| | isoform 4 | | | | | |
| CD38_HUMAN | ADP- | CD38 | EPI, ENDO | Symptoms | Membrane; | UniProt, |
| | ribosyl | | | | Single-pass | Literature |
| | cyclase 1 | | | | type II | |
| | | | | | membrane | |
| | | | | | protein. | |
| CD40L_HUMAN | CD40 | CD40LG | | LungCancers, | Cell membrane; | UniProt, |
| | ligand | | | BenignNodules, | Single-pass | Literature |
| | | | | Symptoms | type II | |
| | | | | | membrane | |
| | | | | | protein.\|CD40 | |
| | | | | | ligand, soluble | |
| | | | | | form: Secreted. | |
| CD44_HUMAN | CD44 | CD44 | EPI | LungCancers, | Membrane; | UniProt, |
| | antigen | | | BenignNodules, | Single-pass | Literature, |
| | | | | Symptoms | type I | Detection, |
| | | | | | membrane | Prediction |
| | | | | | protein. | |
| CD59_HUMAN | CD59 | CD59 | | LungCancers, | Cell membrane; | UniProt, |
| | glycoprotein | | | BenignNodules, | Lipid-anchor, | Literature, |
| | | | | Symptoms | GPI-anchor. | Detection, |
| | | | | | Secreted. | Prediction |
| | | | | | Note = Soluble | |
| | | | | | form found in a | |
| | | | | | number of | |
| | | | | | tissues. | |
| CD97_HUMAN | CD97 | CD97 | EPI, ENDO | Symptoms | Cell membrane; | UniProt |
| | antigen | | | | Multi-pass | |
| | | | | | membrane | |
| | | | | | protein.\|CD97 | |
| | | | | | antigen subunit | |
| | | | | | alpha: Secreted, | |
| | | | | | extracellular | |
| | | | | | space. | |
| CDCP1_HUMAN | CUB | CDCP1 | | LungCancers | Isoform 1: Cell | UniProt, |
| | domain- | | | | membrane; | Prediction |
| | containing | | | | Single-pass | |
| | protein 1 | | | | membrane | |
| | | | | | protein | |
| | | | | | (Potential). | |
| | | | | | Note = Shedding | |
| | | | | | may also lead to | |
| | | | | | a soluble | |
| | | | | | peptide.\|Isoform | |
| | | | | | 3: Secreted. | |
| CDK4_HUMAN | Cell | CDK4 | | LungCancers, | | Literature |
| | division | | | Symptoms | | |
| | protein | | | | | |
| | kinase 4 | | | | | |
| CEAM5_HUMAN | Carcinoembryonic | CEACAM5 | EPI | LungCancers, | Cell membrane; | Literature, |
| | antigen- | | | BenignNodules, | Lipid-anchor, | Prediction |
| | related cell | | | Symptoms | GPI-anchor. | |
| | adhesion | | | | | |
| | molecule 5 | | | | | |
| CEAM8_HUMAN | Carcinoembryonic | CEACAM8 | EPI | LungCancers | Cell membrane; | Detection, |
| | antigen- | | | | Lipid-anchor, | Prediction |
| | related cell | | | | GPI-anchor. | |
| | adhesion | | | | | |
| | molecule 8 | | | | | |
| CERU_HUMAN | Ceruloplasmin | CP | EPI | LungCancers, | Secreted. | UniProt, |
| | | | | Symptoms | | Literature, |
| | | | | | | Detection, |
| | | | | | | Prediction |
| CH10_HUMAN | 10 kDa | HSPE1 | ENDO | LungCancers | Mitochondrion | Literature, |
| | heat shock | | | | matrix. | Detection, |
| | protein, | | | | | Prediction |
| | mitochondrial | | | | | |
| CH60_HUMAN | 60 kDa | HSPD1 | Secreted, | LungCancers, | Mitochondrion | Literature, |
| | heat shock | | EPI, ENDO | Symptoms | matrix. | Detection |
| | protein, | | | | | |
| | mitochondrial | | | | | |
| CKAP4_HUMAN | Cytoskeleton- | CKAP4 | EPI, ENDO | LungCancers | Endoplasmic | UniProt |
| | associated | | | | reticulum-Golgi | |
| | protein 4 | | | | intermediate | |
| | | | | | compartment | |
| | | | | | membrane; | |
| | | | | | Single-pass | |
| | | | | | membrane | |
| | | | | | protein | |
| | | | | | (Potential). | |
| CL041_HUMAN | Uncharacterized | C12orf41 | ENDO | | | Prediction |
| | protein | | | | | |
| | C12orf41 | | | | | |
| CLCA1_HUMAN | Calcium- | CLCA1 | | LungCancers, | Secreted, | UniProt, |
| | activated | | | BenignNodules | extracellular | Prediction |
| | chloride | | | | space. Cell | |
| | channel | | | | membrane; | |
| | regulator 1 | | | | Peripheral | |
| | | | | | membrane | |
| | | | | | protein; | |
| | | | | | Extracellular | |
| | | | | | side. | |
| | | | | | Note = Protein | |
| | | | | | that remains | |
| | | | | | attached to the | |
| | | | | | plasma | |
| | | | | | membrane | |
| | | | | | appeared to be | |
| | | | | | predominantly | |
| | | | | | localized to | |
| | | | | | microvilli. | |
| CLIC1_HUMAN | Chloride | CLIC1 | EPI | | Nucleus. | UniProt, |
| | intracellular | | | | Nucleus | Literature, |
| | channel | | | | membrane; | Detection |
| | protein 1 | | | | Single-pass | |
| | | | | | membrane | |
| | | | | | protein | |
| | | | | | (Probable). | |
| | | | | | Cytoplasm. Cell | |
| | | | | | membrane; | |
| | | | | | Single-pass | |
| | | | | | membrane | |
| | | | | | protein | |
| | | | | | (Probable). | |
| | | | | | Note = Mostly in | |
| | | | | | the nucleus | |
| | | | | | including in the | |
| | | | | | nuclear | |
| | | | | | membrane. | |
| | | | | | Small amount | |
| | | | | | in the | |
| | | | | | cytoplasm and | |
| | | | | | the plasma | |
| | | | | | membrane. | |
| | | | | | Exists both as | |
| | | | | | soluble | |
| | | | | | cytoplasmic | |
| | | | | | protein and as | |
| | | | | | membrane | |
| | | | | | protein with | |
| | | | | | probably a | |
| | | | | | single | |
| | | | | | transmembrane | |
| | | | | | domain. | |
| CLUS_HUMAN | Clusterin | CLU | EPI, ENDO | LungCancers, | Secreted. | UniProt, |
| | | | | BenignNodules, | | Literature, |
| | | | | Symptoms | | Detection, |
| | | | | | | Prediction |
| CMGA_HUMAN | Chromogranin-A | CHGA | | LungCancers, | Secreted. | UniProt, |
| | | | | BenignNodules | Note = Neuroendocrine | Literature, |
| | | | | | and | Detection, |
| | | | | | endocrine | Prediction |
| | | | | | secretory | |
| | | | | | granules. | |
| CNTN1_HUMAN | Contactin-1 | CNTN1 | | LungCancers | Isoform 1: Cell | Detection, |
| | | | | | membrane; | Prediction |
| | | | | | Lipid-anchor, | |
| | | | | | GPI-anchor; | |
| | | | | | Extracellular | |
| | | | | | side.\|Isoform 2: | |
| | | | | | Cell membrane; | |
| | | | | | Lipid-anchor, | |
| | | | | | GPI-anchor; | |
| | | | | | Extracellular | |
| | | | | | side. | |
| C04A1_HUMAN | Collagen | COL4A1 | | LungCancers | Secreted, | UniProt, |
| | alpha-1(IV) | | | | extracellular | Detection, |
| | chain | | | | space, | Prediction |
| | | | | | extracellular | |
| | | | | | matrix, | |
| | | | | | basement | |
| | | | | | membrane. | |
| C05A2_HUMAN | Collagen | COL5A2 | | LungCancers | Secreted, | UniProt, |
| | alpha-2(V) | | | | extracellular | Detection, |
| | chain | | | | space, | Prediction |
| | | | | | extracellular | |
| | | | | | matrix (By | |
| | | | | | similarity). | |
| C06A3_HUMAN | Collagen | COL6A3 | Secreted | Symptoms | Secreted, | UniProt, |
| | alpha-3(VI) | | | | extracellular | Detection, |
| | chain | | | | space, | Prediction |
| | | | | | extracellular | |
| | | | | | matrix (By | |
| | | | | | similarity). | |
| COCA1_HUMAN | Collagen | COL12A1 | ENDO | LungCancers, | Secreted, | UniProt, |
| | alpha- | | | Symptoms | extracellular | Prediction |
| | 1(XII) | | | | space, | |
| | chain | | | | extracellular | |
| | | | | | matrix (By | |
| | | | | | similarity). | |
| COF1_HUMAN | Cofilin-1 | CFL1 | Secreted, | LungCancers, | Nucleus matrix. | Detection, |
| | | | EPI | BenignNodules | Cytoplasm, | Prediction |
| | | | | | cytoskeleton. | |
| | | | | | Note = Almost | |
| | | | | | completely in | |
| | | | | | nucleus in cells | |
| | | | | | exposed to heat | |
| | | | | | shock or 10% | |
| | | | | | dimethyl | |
| | | | | | sulfoxide. | |
| COIA1_HUMAN | Collagen | COL18A1 | | LungCancers, | Secreted, | UniProt, |
| | alpha- | | | BenignNodules | extracellular | Literature, |
| | 1(XVIII) | | | | space, | Detection, |
| | chain | | | | extracellular | Prediction |
| | | | | | matrix (By | |
| | | | | | similarity). | |
| COX5A_HUMAN | Cytochrome | COX5A | Secreted, | | Mitochondrion | Prediction |
| | c oxidase | | ENDO | | inner | |
| | subunit 5A, | | | | membrane. | |
| | mitochondrial | | | | | |
| CRP_HUMAN | C-reactive | CRP | | LungCancers, | Secreted. | UniProt, |
| | protein | | | BenignNodules, | | Literature, |
| | | | | Symptoms | | Detection, |
| | | | | | | Prediction |
| CS051_HUMAN | UPF0470 | C19orf51 | ENDO | | | Prediction |
| | protein | | | | | |
| | C19orf51 | | | | | |
| CSF1_HUMAN | Macrophage | CSF1 | | LungCancers, | Cell membrane; | UniProt, |
| | colony- | | | BenignNodules | Single-pass | Literature, |
| | stimulating | | | | membrane | Detection |
| | factor 1 | | | | protein (By | |
| | | | | | similarity).\|Processed | |
| | | | | | macrophage | |
| | | | | | colony- | |
| | | | | | stimulating | |
| | | | | | factor 1: | |
| | | | | | Secreted, | |
| | | | | | extracellular | |
| | | | | | space (By | |
| | | | | | similarity). | |
| CSF2_HUMAN | Granulocyte- | CSF2 | | LungCancers, | Secreted. | UniProt, |
| | macrophage | | | BenignNodules | | Literature, |
| | colony- | | | | | Prediction |
| | stimulating | | | | | |
| | factor | | | | | |
| CT085_HUMAN | Uncharacterized | C20orf85 | | LungCancers, | | Prediction |
| | protein | | | BenignNodules | | |
| | C20orf85 | | | | | |
| CTGF_HUMAN | Connective | CTGF | | LungCancers, | Secreted, | UniProt, |
| | tissue | | | BenignNodules | extracellular | Literature, |
| | growth | | | | space, | Detection, |
| | factor | | | | extracellular | Prediction |
| | | | | | matrix (By | |
| | | | | | similarity). | |
| | | | | | Secreted (By | |
| | | | | | similarity). | |
| CYR61_HUMAN | Protein | CYR61 | | LungCancers, | Secreted. | UniProt, |
| | CYR61 | | | BenignNodules | | Prediction |
| CYTA_HUMAN | Cystatin-A | CSTA | | LungCancers | Cytoplasm. | Literature, |
| | | | | | | Detection |
| CYTB_HUMAN | Cystatin-B | CSTB | Secreted | | Cytoplasm. | Literature, |
| | | | | | Nucleus. | Detection |
| DDX17_HUMAN | Probable | DDX17 | ENDO | LungCancers, | Nucleus. | Detection, |
| | ATP- | | | BenignNodules | | Prediction |
| | dependent | | | | | |
| | RNA | | | | | |
| | helicase | | | | | |
| | DDX17 | | | | | |
| DEFB1_HUMAN | Beta- | DEFB1 | | LungCancers, | Secreted. | UniProt, |
| | defensin 1 | | | BenignNodules | | Prediction |
| DESP_HUMAN | Desmoplakin | DSP | EPI, ENDO | LungCancers | Cell junction, | Detection |
| | | | | | desmosome. | |
| | | | | | Cytoplasm, | |
| | | | | | cytoskeleton. | |
| | | | | | Note = Innermost | |
| | | | | | portion of the | |
| | | | | | desmosomal | |
| | | | | | plaque. | |
| DFB4A_HUMAN | Beta- | DEFB4A | | LungCancers, | Secreted. | UniProt |
| | defensin | | | BenignNodules | | |
| | 4A | | | | | |
| DHI1L_HUMAN | Hydroxysteroid | HSD11B1L | | LungCancers | Secreted | UniProt, |
| | 11- | | | | (Potential). | Prediction |
| | beta- | | | | | |
| | dehydrogenase | | | | | |
| | 1-like | | | | | |
| | protein | | | | | |
| DMBT1_HUMAN | Deleted in | DMBT1 | | LungCancers, | Secreted (By | UniProt, |
| | malignant | | | BenignNodules | similarity). | Detection, |
| | brain | | | | Note = Some | Prediction |
| | tumors 1 | | | | isoforms may | |
| | protein | | | | be membrane- | |
| | | | | | bound. | |
| | | | | | Localized to the | |
| | | | | | lumenal aspect | |
| | | | | | of crypt cells in | |
| | | | | | the small | |
| | | | | | intestine. In the | |
| | | | | | colon, seen in | |
| | | | | | the lumenal | |
| | | | | | aspect of | |
| | | | | | surface | |
| | | | | | epithelial cells. | |
| | | | | | Formed in the | |
| | | | | | ducts of von | |
| | | | | | Ebner gland, | |
| | | | | | and released | |
| | | | | | into the fluid | |
| | | | | | bathing the taste | |
| | | | | | buds contained | |
| | | | | | in the taste | |
| | | | | | papillae (By | |
| | | | | | similarity). | |
| DMKN_HUMAN | Dermokine | DMKN | | LungCancers | Secreted. | UniProt, |
| | | | | | | Detection, |
| | | | | | | Prediction |
| DPP4_HUMAN | Dipeptidyl | DPP4 | EPI | LungCancers, | Dipeptidyl | UniProt, |
| | peptidase 4 | | | BenignNodules, | peptidase 4 | Detection |
| | | | | Symptoms | soluble form: | |
| | | | | | Secreted.\|Cell | |
| | | | | | membrane; | |
| | | | | | Single-pass | |
| | | | | | type II | |
| | | | | | membrane | |
| | | | | | protein. | |
| DSG2_HUMAN | Desmoglein-2 | DSG2 | ENDO | Symptoms | Cell membrane; | UniProt, |
| | | | | | Single-pass | Detection |
| | | | | | type I | |
| | | | | | membrane | |
| | | | | | protein. Cell | |
| | | | | | junction, | |
| | | | | | desmosome. | |
| DX39A_HUMAN | ATP- | DDX39A | EPI | | Nucleus (By | Prediction |
| | dependent | | | | similarity). | |
| | RNA | | | | | |
| | helicase | | | | | |
| | DDX39A | | | | | |
| DX39B_HUMAN | Spliceosome | DDX39B | EPI | | Nucleus. | Prediction |
| | RNA | | | | Nucleus | |
| | helicase | | | | speckle. | |
| | DDX39B | | | | | |
| DYRK2_HUMAN | Dual | DYRK2 | ENDO | LungCancers | Cytoplasm. | Literature |
| | specificity | | | | Nucleus. | |
| | tyrosine- | | | | Note = Translocates | |
| | phosphorylation- | | | | into the | |
| | regulated | | | | nucleus | |
| | kinase 2 | | | | following DNA | |
| | | | | | damage. | |
| EDN2_HUMAN | Endothelin-2 | EDN2 | | LungCancers | Secreted. | UniProt, |
| | | | | | | Prediction |
| EF1A1_HUMAN | Elongation | EEF1A1 | Secreted, | LungCancers, | Cytoplasm. | Detection |
| | factor 1- | | EPI | BenignNodules | | |
| | alpha 1 | | | | | |
| EF1D_HUMAN | Elongation | EEF1D | Secreted, | LungCancers | | Prediction |
| | factor 1- | | EPI | | | |
| | delta | | | | | |
| EF2_HUMAN | Elongation | EEF2 | Secreted, | | Cytoplasm. | Literature, |
| | factor 2 | | EPI | | | Detection |
| EGF_HUMAN | Pro- | EGF | | LungCancers, | Membrane; | UniProt, |
| | epidermal | | | BenignNodules, | Single-pass | Literature |
| | growth | | | Symptoms | type I | |
| | factor | | | | membrane | |
| | | | | | protein. | |
| EGFL6_HUMAN | Epidermal | EGFL6 | | LungCancers | Secreted, | UniProt, |
| | growth | | | | extracellular | Detection, |
| | factor-like | | | | space, | Prediction |
| | protein 6 | | | | extracellular | |
| | | | | | matrix, | |
| | | | | | basement | |
| | | | | | membrane (By | |
| | | | | | similarity). | |
| ENOA_HUMAN | Alpha- | ENO1 | Secreted, | LungCancers, | Cytoplasm. Cell | Literature, |
| | enolase | | EPI, ENDO | BenignNodules, | membrane. | Detection, |
| | | | | Symptoms | Cytoplasm, | Prediction |
| | | | | | myofibril, | |
| | | | | | sarcomere, M- | |
| | | | | | band. Note = Can | |
| | | | | | translocate to | |
| | | | | | the plasma | |
| | | | | | membrane in | |
| | | | | | either the | |
| | | | | | homodimeric | |
| | | | | | (alpha/alpha) or | |
| | | | | | heterodimeric | |
| | | | | | (alpha/gamma) | |
| | | | | | form. ENO1 is | |
| | | | | | localized to the | |
| | | | | | M- | |
| | | | | | band.\|Isoform | |
| | | | | | MBP-1: | |
| | | | | | Nucleus. | |
| ENOG_HUMAN | Gamma- | ENO2 | EPI | LungCancers, | Cytoplasm (By | Literature, |
| | enolase | | | Symptoms | similarity). Cell | Detection, |
| | | | | | membrane (By | Prediction |
| | | | | | similarity). | |
| | | | | | Note = Can | |
| | | | | | translocate to | |
| | | | | | the plasma | |
| | | | | | membrane in | |
| | | | | | either the | |
| | | | | | homodimeric | |
| | | | | | (alpha/alpha) or | |
| | | | | | heterodimeric | |
| | | | | | (alpha/gamma) | |
| | | | | | form (By | |
| | | | | | similarity). | |
| ENOX2_HUMAN | Ecto-NOX | ENOX2 | | LungCancers | Cell membrane. | UniProt, |
| | disulfide- | | | | Secreted, | Detection |
| | thiol | | | | extracellular | |
| | exchanger 2 | | | | space. | |
| | | | | | Note = Extracellular | |
| | | | | | and plasma | |
| | | | | | membrane- | |
| | | | | | associated. | |
| ENPL_HUMAN | Endoplasmin | HSP90B1 | Secreted, | LungCancers, | Endoplasmic | Literature, |
| | | | EPI, ENDO | BenignNodules, | reticulum | Detection, |
| | | | | Symptoms | lumen. | Prediction |
| | | | | | Melanosome. | |
| | | | | | Note = Identified | |
| | | | | | by mass | |
| | | | | | spectrometry in | |
| | | | | | melanosome | |
| | | | | | fractions from | |
| | | | | | stage I to stage | |
| | | | | | IV. | |
| EPHB6_HUMAN | Ephrin | EPHB6 | | LungCancers | Membrane; | UniProt, |
| | type-B | | | | Single-pass | Literature |
| | receptor 6 | | | | type I | |
| | | | | | membrane | |
| | | | | | protein.\|Isoform | |
| | | | | | 3: Secreted | |
| | | | | | (Probable). | |
| EPOR_HUMAN | Erythropoietin | EPOR | | LungCancers, | Cell membrane; | UniProt, |
| | receptor | | | BenignNodules, | Single-pass | Literature, |
| | | | | Symptoms | type I | Detection |
| | | | | | membrane | |
| | | | | | protein.\|Isoform | |
| | | | | | EPOR-S: | |
| | | | | | Secreted. | |
| | | | | | Note = Secreted | |
| | | | | | and located to | |
| | | | | | the cell surface. | |
| ERBB3_HUMAN | Receptor | ERBB3 | | LungCancers, | Isoform 1: Cell | UniProt, |
| | tyrosine- | | | BenignNodules | membrane; | Literature, |
| | protein | | | | Single-pass | Prediction |
| | kinase | | | | type I | |
| | erbB-3 | | | | membrane | |
| | | | | | protein.\|Isoform | |
| | | | | | 2: Secreted. | |
| EREG_HUMAN | Proepiregulin | EREG | | LungCancers | Epiregulin: | UniProt |
| | | | | | Secreted, | |
| | | | | | extracellular | |
| | | | | | space.\|Proepiregulin: | |
| | | | | | Cell | |
| | | | | | membrane; | |
| | | | | | Single-pass | |
| | | | | | type I | |
| | | | | | membrane | |
| | | | | | protein. | |
| ERO1A_HUMAN | ERO1-like | ERO1L | Secreted, | Symptoms | Endoplasmic | Prediction |
| | protein | | EPI, ENDO | | reticulum | |
| | alpha | | | | membrane; | |
| | | | | | Peripheral | |
| | | | | | membrane | |
| | | | | | protein; | |
| | | | | | Lumenal side. | |
| | | | | | Note = The | |
| | | | | | association with | |
| | | | | | ERP44 is | |
| | | | | | essential for its | |
| | | | | | retention in the | |
| | | | | | endoplasmic | |
| | | | | | reticulum. | |
| ESM1_HUMAN | Endothelial | ESM1 | | LungCancers, | Secreted. | UniProt, |
| | cell- | | | BenignNodules | | Prediction |
| | specific | | | | | |
| | molecule 1 | | | | | |
| EZRI_HUMAN | Ezrin | EZR | Secreted | LungCancers, | Apical cell | Literature, |
| | | | | BenignNodules | membrane; | Detection, |
| | | | | | Peripheral | Prediction |
| | | | | | membrane | |
| | | | | | protein; | |
| | | | | | Cytoplasmic | |
| | | | | | side. Cell | |
| | | | | | projection. Cell | |
| | | | | | projection, | |
| | | | | | microvillus | |
| | | | | | membrane; | |
| | | | | | Peripheral | |
| | | | | | membrane | |
| | | | | | protein; | |
| | | | | | Cytoplasmic | |
| | | | | | side. Cell | |
| | | | | | projection, | |
| | | | | | ruffle | |
| | | | | | membrane; | |
| | | | | | Peripheral | |
| | | | | | membrane | |
| | | | | | protein; | |
| | | | | | Cytoplasmic | |
| | | | | | side. | |
| | | | | | Cytoplasm, cell | |
| | | | | | cortex. | |
| | | | | | Cytoplasm, | |
| | | | | | cytoskeleton. | |
| | | | | | Note = Localization | |
| | | | | | to the apical | |
| | | | | | membrane of | |
| | | | | | parietal cells | |
| | | | | | depends on the | |
| | | | | | interaction with | |
| | | | | | MPP5. | |
| | | | | | Localizes to cell | |
| | | | | | extensions and | |
| | | | | | peripheral | |
| | | | | | processes of | |
| | | | | | astrocytes (By | |
| | | | | | similarity). | |
| | | | | | Microvillar | |
| | | | | | peripheral | |
| | | | | | membrane | |
| | | | | | protein | |
| | | | | | (cytoplasmic | |
| | | | | | side). | |
| F10A1_HUMAN | Hsc70- | ST13 | EPI | | Cytoplasm (By | Detection, |
| | interacting | | | | similarity).\|Cytoplasm | Prediction |
| | protein | | | | (Probable). | |
| FAM3C_HUMAN | Protein | FAM3C | EPI, ENDO | | Secreted | UniProt, |
| | FAM3C | | | | (Potential). | Detection |
| FAS_HUMAN | Fatty acid | FASN | EPI | LungCancers, | Cytoplasm. | Literature, |
| | synthase | | | BenignNodules, | Melanosome. | Detection |
| | | | | Symptoms | Note = Identified | |
| | | | | | by mass | |
| | | | | | spectrometry in | |
| | | | | | melanosome | |
| | | | | | fractions from | |
| | | | | | stage I to stage | |
| | | | | | IV. | |
| FCGR1_HUMAN | High | FCGR1A | EPI | LungCancers, | Cell membrane; | UniProt |
| | affinity | | | BenignNodules, | Single-pass | |
| | immunoglobulin | | | Symptoms | type I | |
| | gamma Fc | | | | membrane | |
| | receptor I | | | | protein. | |
| | | | | | Note = Stabilized | |
| | | | | | at the cell | |
| | | | | | membrane | |
| | | | | | through | |
| | | | | | interaction with | |
| | | | | | FCER1G. | |
| FGF10_HUMAN | Fibroblast | FGF10 | | LungCancers | Secreted | UniProt, |
| | growth | | | | (Potential). | Prediction |
| | factor 10 | | | | | |
| FGF2_HUMAN | Heparin- | FGF2 | | LungCancers, | | Literature |
| | binding | | | BenignNodules, | | |
| | growth | | | Symptoms | | |
| | factor 2 | | | | | |
| FGF7_HUMAN | Keratinocyte | FGF7 | | LungCancers, | Secreted. | UniProt, |
| | growth | | | BenignNodules | | Literature, |
| | factor | | | | | Prediction |
| FGF9_HUMAN | Glia- | FGF9 | | LungCancers | Secreted. | UniProt, |
| | activating | | | | | Literature, |
| | factor | | | | | Prediction |
| FGFR2_HUMAN | Fibroblast | FGFR2 | | LungCancers, | Cell membrane; | UniProt, |
| | growth | | | BenignNodules | Single-pass | Literature, |
| | factor | | | | type I | Prediction |
| | receptor 2 | | | | membrane | |
| | | | | | protein.\|Isoform | |
| | | | | | 14: | |
| | | | | | Secreted.\|Isoform | |
| | | | | | 19: Secreted. | |
| FGFR3_HUMAN | Fibroblast | FGFR3 | | LungCancers | Membrane; | UniProt, |
| | growth | | | | Single-pass | Literature, |
| | factor | | | | type I | Prediction |
| | receptor 3 | | | | membrane | |
| | | | | | protein. | |
| FGL2_HUMAN | Fibroleukin | FGL2 | | BenignNodules, | Secreted. | UniProt, |
| | | | | Symptoms | | Detection, |
| | | | | | | Prediction |
| FHIT_HUMAN | Bis(5′- | FHIT | | LungCancers, | Cytoplasm. | Literature |
| | adenosyl)- | | | BenignNodules, | | |
| | triphosphatase | | | Symptoms | | |
| FIBA_HUMAN | Fibrinogen | FGA | | LungCancers, | Secreted. | UniProt, |
| | alpha chain | | | BenignNodules, | | Literature, |
| | | | | Symptoms | | Detection, |
| | | | | | | Prediction |
| FINC_HUMAN | Fibronectin | FN1 | Secreted, | LungCancers, | Secreted, | UniProt, |
| | | | EPI, ENDO | BenignNodules, | extracellular | Literature, |
| | | | | Symptoms | space, | Detection, |
| | | | | | extracellular | Prediction |
| | | | | | matrix. | |
| FKB11_HUMAN | Peptidyl- | FKBP11 | EPI, ENDO | | Membrane; | UniProt, |
| | prolyl cis- | | | | Single-pass | Prediction |
| | trans | | | | membrane | |
| | isomerase | | | | protein | |
| | FKBP11 | | | | (Potential). | |
| FOLH1_HUMAN | Glutamate | FOLH1 | ENDO | LungCancers, | Cell membrane; | UniProt, |
| | carboxypeptidase 2 | | | Symptoms | Single-pass | Literature |
| | | | | | type II | |
| | | | | | membrane | |
| | | | | | protein.\|Isoform | |
| | | | | | PSMA′: | |
| | | | | | Cytoplasm. | |
| FOLR1_HUMAN | Folate | FOLR1 | | LungCancers | Cell membrane; | UniProt |
| | receptor | | | | Lipid-anchor, | |
| | alpha | | | | GPI-anchor. | |
| | | | | | Secreted | |
| | | | | | (Probable). | |
| FOXA2_HUMAN | Hepatocyte | FOXA2 | | LungCancers | Nucleus. | Detection, |
| | nuclear | | | | | Prediction |
| | factor 3- | | | | | |
| | beta | | | | | |
| FP100_HUMAN | Fanconi | C17orf70 | ENDO | Symptoms | Nucleus. | Prediction |
| | anemia- | | | | | |
| | associated | | | | | |
| | protein of | | | | | |
| | 100 kDa | | | | | |
| FRIH_HUMAN | Ferritin | FTH1 | EPI | LungCancers, | | Literature, |
| | heavy | | | BenignNodules | | Detection, |
| | chain | | | | | Prediction |
| FRIL_HUMAN | Ferritin | FTL | Secreted, | BenignNodules, | | Literature, |
| | light chain | | EPI, ENDO | Symptoms | | Detection |
| G3P_HUMAN | Glyceraldehyde- | GAPDH | Secreted, | LungCancers, | Cytoplasm. | Detection |
| | 3- | | EPI, ENDO | BenignNodules, | Cytoplasm, | |
| | phosphate | | | Symptoms | perinuclear | |
| | dehydrogenase | | | | region. | |
| | | | | | Membrane. | |
| | | | | | Note = Postnuclear | |
| | | | | | and | |
| | | | | | Perinuclear | |
| | | | | | regions. | |
| G6PD_HUMAN | Glucose-6- | G6PD | Secreted, | LungCancers, | | Literature, |
| | phosphate | | EPI | Symptoms | | Detection |
| | 1- | | | | | |
| | dehydrogenase | | | | | |
| G6PI_HUMAN | Glucose-6- | GPI | Secreted, | Symptoms | Cytoplasm. | UniProt, |
| | phosphate | | EPI | | Secreted. | Literature, |
| | isomerase | | | | | Detection |
| GA2L1_HUMAN | GAS2-like | GAS2L1 | ENDO | | Cytoplasm, | Prediction |
| | protein 1 | | | | cytoskeleton | |
| | | | | | (Probable). | |
| GALT2_HUMAN | Polypeptide | GALNT2 | EPI, ENDO | | Golgi | UniProt, |
| | N- | | | | apparatus, | Detection |
| | acetylgalactosaminyl- | | | | Golgi stack | |
| | transferase 2 | | | | membrane; | |
| | | | | | Single-pass | |
| | | | | | type II | |
| | | | | | membrane | |
| | | | | | protein. | |
| | | | | | Secreted. | |
| | | | | | Note = Resides | |
| | | | | | preferentially in | |
| | | | | | the trans and | |
| | | | | | medial parts of | |
| | | | | | the Golgi stack. | |
| | | | | | A secreted form | |
| | | | | | also exists. | |
| GAS6_HUMAN | Growth | GAS6 | | LungCancers | Secreted. | UniProt, |
| | arrest- | | | | | Detection, |
| | specific | | | | | Prediction |
| | protein 6 | | | | | |
| GDIR2_HUMAN | Rho GDP- | ARHGDIB | EPI | | Cytoplasm. | Detection |
| | dissociation | | | | | |
| | inhibitor 2 | | | | | |
| GELS_HUMAN | Gelsolin | GSN | | LungCancers, | Isoform 2: | UniProt, |
| | | | | BenignNodules | Cytoplasm, | Literature, |
| | | | | | cytoskeleton.\|Isoform | Detection, |
| | | | | | 1: | Prediction |
| | | | | | Secreted. | |
| GGH_HUMAN | Gamma- | GGH | | LungCancers | Secreted, | UniProt, |
| | glutamyl | | | | extracellular | Detection, |
| | hydrolase | | | | space. | Prediction |
| | | | | | Lysosome. | |
| | | | | | Melanosome. | |
| | | | | | Note = While its | |
| | | | | | intracellular | |
| | | | | | location is | |
| | | | | | primarily the | |
| | | | | | lysosome, most | |
| | | | | | of the enzyme | |
| | | | | | activity is | |
| | | | | | secreted. | |
| | | | | | Identified by | |
| | | | | | mass | |
| | | | | | spectrometry in | |
| | | | | | melanosome | |
| | | | | | fractions from | |
| | | | | | stage I to stage | |
| | | | | | IV. | |
| GPC3_HUMAN | Glypican-3 | GPC3 | | LungCancers, | Cell membrane; | UniProt, |
| | | | | Symptoms | Lipid-anchor, | Literature, |
| | | | | | GPI-anchor; | Prediction |
| | | | | | Extracellular | |
| | | | | | side (By | |
| | | | | | similarity).\|Secreted | |
| | | | | | glypican-3: | |
| | | | | | Secreted, | |
| | | | | | extracellular | |
| | | | | | space (By | |
| | | | | | similarity). | |
| GRAN_HUMAN | Grancalcin | GCA | EPI | | Cytoplasm. | Prediction |
| | | | | | Cytoplasmic | |
| | | | | | granule | |
| | | | | | membrane; | |
| | | | | | Peripheral | |
| | | | | | membrane | |
| | | | | | protein; | |
| | | | | | Cytoplasmic | |
| | | | | | side. | |
| | | | | | Note = Primarily | |
| | | | | | cytosolic in the | |
| | | | | | absence of | |
| | | | | | calcium or | |
| | | | | | magnesium | |
| | | | | | ions. Relocates | |
| | | | | | to granules and | |
| | | | | | other | |
| | | | | | membranes in | |
| | | | | | response to | |
| | | | | | elevated | |
| | | | | | calcium and | |
| | | | | | magnesium | |
| | | | | | levels. | |
| GREB1_HUMAN | Protein | GREB1 | ENDO | | Membrane; | UniProt, |
| | GREB1 | | | | Single-pass | Prediction |
| | | | | | membrane | |
| | | | | | protein | |
| | | | | | (Potential). | |
| GREM1_HUMAN | Gremlin-1 | GREM1 | | LungCancers, | Secreted | UniProt, |
| | | | | BenignNodules | (Probable). | Prediction |
| GRP_HUMAN | Gastrin- | GRP | | LungCancers, | Secreted. | UniProt, |
| | releasing | | | Symptoms | | Prediction |
| | peptide | | | | | |
| GRP78_HUMAN | 78 kDa | HSPA5 | Secreted, | LungCancers, | Endoplasmic | Detection, |
| | glucose- | | EPI, ENDO | BenignNodules | reticulum | Prediction |
| | regulated | | | | lumen. | |
| | protein | | | | Melanosome. | |
| | | | | | Note = Identified | |
| | | | | | by mass | |
| | | | | | spectrometry in | |
| | | | | | melanosome | |
| | | | | | fractions from | |
| | | | | | stage I to stage | |
| | | | | | IV. | |
| GSLG1_HUMAN | Golgi | GLG1 | EPI, ENDO | BenignNodules | Golgi apparatus | UniProt |
| | apparatus | | | | membrane; | |
| | protein 1 | | | | Single-pass | |
| | | | | | type I | |
| | | | | | membrane | |
| | | | | | protein. | |
| GSTP1_HUMAN | Glutathione | GSTP1 | Secreted | LungCancers, | | Literature, |
| | S- | | | BenignNodules, | | Detection, |
| | transferase P | | | Symptoms | | Prediction |
| GTR1_HUMAN | Solute | SLC2A1 | EPI, ENDO | LungCancers, | Cell membrane; | Literature |
| | carrier | | | BenignNodules, | Multi-pass | |
| | family 2, | | | Symptoms | membrane | |
| | facilitated | | | | protein (By | |
| | glucose | | | | similarity). | |
| | transporter | | | | Melanosome. | |
| | member 1 | | | | Note = Localizes | |
| | | | | | primarily at the | |
| | | | | | cell surface (By | |
| | | | | | similarity). | |
| | | | | | Identified by | |
| | | | | | mass | |
| | | | | | spectrometry in | |
| | | | | | melanosome | |
| | | | | | fractions from | |
| | | | | | stage I to stage | |
| | | | | | IV. | |
| GTR3_HUMAN | Solute | SLC2A3 | EPI | | Membrane; | Detection |
| | carrier | | | | Multi-pass | |
| | family 2, | | | | membrane | |
| | facilitated | | | | protein. | |
| | glucose | | | | | |
| | transporter | | | | | |
| | member 3 | | | | | |
| H2A1_HUMAN | Histone | HIST1H2AG | Secreted | | Nucleus. | Detection, |
| | H2A type 1 | | | | | Prediction |
| H2A1B_HUMAN | Histone | HIST1H2AB | Secreted | | Nucleus. | Detection, |
| | H2A type | | | | | Prediction |
| | 1-B/E | | | | | |
| H2A1C_HUMAN | Histone | HIST1H2AC | Secreted | | Nucleus. | Literature, |
| | H2A type | | | | | Detection, |
| | 1-C | | | | | Prediction |
| H2A1D_HUMAN | Histone | HIST1H2AD | Secreted | | Nucleus. | Detection, |
| | H2A type | | | | | Prediction |
| | 1-D | | | | | |
| HG2A_HUMAN | HLA class | CD74 | | LungCancers, | Membrane; | UniProt, |
| | II | | | BenignNodules, | Single-pass | Literature |
| | histocompatibility | | | Symptoms | type II | |
| | antigen | | | | membrane | |
| | gamma | | | | protein | |
| | chain | | | | (Potential). | |
| HGF_HUMAN | Hepatocyte | HGF | | LungCancers, | | Literature, |
| | growth | | | BenignNodules, | | Prediction |
| | factor | | | Symptoms | | |
| HMGA1_HUMAN | High | HMGA1 | | LungCancers, | Nucleus. | Literature |
| | mobility | | | BenignNodules, | | |
| | group | | | Symptoms | | |
| | protein | | | | | |
| | HMG- | | | | | |
| | I/HMG-Y | | | | | |
| HPRT_HUMAN | Hypoxanthine- | HPRT1 | EPI | | Cytoplasm. | Detection, |
| | guanine | | | | | Prediction |
| | phosphoribosyltransferase | | | | | |
| HPSE_HUMAN | Heparanase | HPSE | | LungCancers, | Lysosome | UniProt, |
| | | | | BenignNodules, | membrane; | Prediction |
| | | | | Symptoms | Peripheral | |
| | | | | | membrane | |
| | | | | | protein. | |
| | | | | | Secreted. | |
| | | | | | Note = Secreted, | |
| | | | | | internalised and | |
| | | | | | transferred to | |
| | | | | | late | |
| | | | | | endosomes/lysosomes | |
| | | | | | as a | |
| | | | | | proheparanase. | |
| | | | | | In lysosomes, it | |
| | | | | | is processed | |
| | | | | | into the active | |
| | | | | | form, the | |
| | | | | | heparanase. The | |
| | | | | | uptake or | |
| | | | | | internalisation | |
| | | | | | of | |
| | | | | | proheparanase | |
| | | | | | is mediated by | |
| | | | | | HSPGs. | |
| | | | | | Heparin appears | |
| | | | | | to be a | |
| | | | | | competitor and | |
| | | | | | retain | |
| | | | | | proheparanase | |
| | | | | | in the | |
| | | | | | extracellular | |
| | | | | | medium. | |
| HPT_HUMAN | Haptoglobin | HP | | LungCancers, | Secreted. | UniProt, |
| | | | | BenignNodules, | | Literature, |
| | | | | Symptoms | | Detection, |
| | | | | | | Prediction |
| HS90A_HUMAN | Heat shock | HSP90AA1 | Secreted, | LungCancers, | Cytoplasm. | Literature, |
| | protein | | EPI | Symptoms | Melanosome. | Detection |
| | HSP 90- | | | | Note = Identified | |
| | alpha | | | | by mass | |
| | | | | | spectrometry in | |
| | | | | | melanosome | |
| | | | | | fractions from | |
| | | | | | stage I to stage | |
| | | | | | IV. | |
| HS90B_HUMAN | Heat shock | HSP90AB1 | Secreted, | LungCancers | Cytoplasm. | Literature, |
| | protein | | EPI | | Melanosome. | Detection |
| | HSP 90- | | | | Note = Identified | |
| | beta | | | | by mass | |
| | | | | | spectrometry in | |
| | | | | | melanosome | |
| | | | | | fractions from | |
| | | | | | stage I to stage | |
| | | | | | IV. | |
| HSPB1_HUMAN | Heat shock | HSPB1 | Secreted, | LungCancers, | Cytoplasm. | Literature, |
| | protein | | EPI | BenignNodules | Nucleus. | Detection, |
| | beta-1 | | | | Cytoplasm, | Prediction |
| | | | | | cytoskeleton, | |
| | | | | | spindle. | |
| | | | | | Note = Cytoplasmic | |
| | | | | | in | |
| | | | | | interphase cells. | |
| | | | | | Colocalizes | |
| | | | | | with mitotic | |
| | | | | | spindles in | |
| | | | | | mitotic cells. | |
| | | | | | Translocates to | |
| | | | | | the nucleus | |
| | | | | | during heat | |
| | | | | | shock. | |
| HTRA1_HUMAN | Serine | HTRA1 | | LungCancers | Secreted. | UniProt, |
| | protease | | | | | Prediction |
| | HTRA1 | | | | | |
| HXK1_HUMAN | Hexokinase-1 | HK1 | ENDO | Symptoms | Mitochondrion | Literature, |
| | | | | | outer | Detection |
| | | | | | membrane. | |
| | | | | | Note = Its | |
| | | | | | hydrophobic N- | |
| | | | | | terminal | |
| | | | | | sequence may | |
| | | | | | be involved in | |
| | | | | | membrane | |
| | | | | | binding. | |
| HYAL2_HUMAN | Hyaluronidase-2 | HYAL2 | | LungCancers | Cell membrane; | Prediction |
| | | | | | Lipid-anchor, | |
| | | | | | GPI-anchor. | |
| HYOU1_HUMAN | Hypoxia | HYOU1 | EPI, ENDO | Symptoms | Endoplasmic | Detection |
| | up- | | | | reticulum | |
| | regulated | | | | lumen. | |
| | protein 1 | | | | | |
| IBP2_HUMAN | Insulin-like | IGFBP2 | | LungCancers | Secreted. | UniProt, |
| | growth | | | | | Literature, |
| | factor- | | | | | Detection, |
| | binding | | | | | Prediction |
| | protein 2 | | | | | |
| IBP3_HUMAN | Insulin-like | IGFBP3 | | LungCancers, | Secreted. | UniProt, |
| | growth | | | BenignNodules, | | Literature, |
| | factor- | | | Symptoms | | Detection, |
| | binding | | | | | Prediction |
| | protein 3 | | | | | |
| ICAM1_HUMAN | Intercellular | ICAM1 | | LungCancers, | Membrane; | UniProt, |
| | adhesion | | | BenignNodules, | Single-pass | Literature, |
| | molecule 1 | | | Symptoms | type I | Detection |
| | | | | | membrane | |
| | | | | | protein. | |
| ICAM3_HUMAN | Intercellular | ICAM3 | EPI, ENDO | LungCancers, | Membrane; | UniProt, |
| | adhesion | | | BenignNodules, | Single-pass | Detection |
| | molecule 3 | | | Symptoms | type I | |
| | | | | | membrane | |
| | | | | | protein. | |
| IDHP_HUMAN | Isocitrate | IDH2 | Secreted, | | Mitochondrion. | Prediction |
| | dehydrogenase | | ENDO | | | |
| | [NADP], | | | | | |
| | mitochondrial | | | | | |
| IF4A1_HUMAN | Eukaryotic | EIF4A1 | Secreted, | | | Detection, |
| | initiation | | EPI, ENDO | | | Prediction |
| | factor 4A-I | | | | | |
| IGF1_HUMAN | Insulin-like | IGF1 | | LungCancers, | Secreted.\|Secreted. | UniProt, |
| | growth | | | BenignNodules, | | Literature, |
| | factor I | | | Symptoms | | Detection, |
| | | | | | | Prediction |
| IKIP_HUMAN | Inhibitor of | IKIP | ENDO | Symptoms | Endoplasmic | UniProt, |
| | nuclear | | | | reticulum | Prediction |
| | factor | | | | membrane; | |
| | kappa-B | | | | Single-pass | |
| | kinase- | | | | membrane | |
| | interacting | | | | protein. | |
| | protein | | | | Note = Isoform 4 | |
| | | | | | deletion of the | |
| | | | | | hydrophobic, or | |
| | | | | | transmembrane | |
| | | | | | region between | |
| | | | | | AA 45-63 | |
| | | | | | results in | |
| | | | | | uniform | |
| | | | | | distribution | |
| | | | | | troughout the | |
| | | | | | cell, suggesting | |
| | | | | | that this region | |
| | | | | | is responsible | |
| | | | | | for endoplasmic | |
| | | | | | reticulum | |
| | | | | | localization. | |
| IL18_HUMAN | Interleukin- | IL18 | | LungCancers, | Secreted. | UniProt, |
| | 18 | | | BenignNodules, | | Literature, |
| | | | | Symptoms | | Prediction |
| IL19_HUMAN | Interleukin- | IL19 | | LungCancers | Secreted. | UniProt, |
| | 19 | | | | | Detection, |
| | | | | | | Prediction |
| IL22_HUMAN | Interleukin- | IL22 | | LungCancers, | Secreted. | UniProt, |
| | 22 | | | BenignNodules | | Prediction |
| IL32_HUMAN | Interleukin- | IL32 | | LungCancers, | Secreted. | UniProt, |
| | 32 | | | BenignNodules | | Prediction |
| IL7_HUMAN | Interleukin-7 | IL7 | | LungCancers, | Secreted. | UniProt, |
| | | | | BenignNodules | | Literature, |
| | | | | | | Prediction |
| IL8_HUMAN | Interleukin-8 | IL8 | | LungCancers, | Secreted. | UniProt, |
| | | | | BenignNodules, | | Literature |
| | | | | Symptoms | | |
| ILEU_HUMAN | Leukocyte | SERPINB1 | Secreted, | | Cytoplasm (By | Detection, |
| | elastase | | EPI | | similarity). | Prediction |
| | inhibitor | | | | | |
| ILK_HUMAN | Integrin- | ILK | Secreted | LungCancers, | Cell junction, | Literature, |
| | linked | | | BenignNodules, | focal adhesion. | Detection |
| | protein | | | Symptoms | Cell membrane; | |
| | kinase | | | | Peripheral | |
| | | | | | membrane | |
| | | | | | protein; | |
| | | | | | Cytoplasmic | |
| | | | | | side. | |
| INHBA_HUMAN | Inhibin | INHBA | | LungCancers, | Secreted. | UniProt, |
| | beta A | | | BenignNodules | | Literature, |
| | chain | | | | | Prediction |
| ISLR_HUMAN | Immunoglobulin | ISLR | | LungCancers | Secreted | UniProt, |
| | superfamily | | | | (Potential). | Detection, |
| | containing | | | | | Prediction |
| | leucine- | | | | | |
| | rich repeat | | | | | |
| | protein | | | | | |
| ITA5_HUMAN | Integrin | ITGA5 | EPI | LungCancers, | Membrane; | UniProt, |
| | alpha-5 | | | BenignNodules, | Single-pass | Literature, |
| | | | | Symptoms | type I | Detection |
| | | | | | membrane | |
| | | | | | protein. | |
| ITAM_HUMAN | Integrin | ITGAM | EPI, ENDO | LungCancers, | Membrane; | UniProt, |
| | alpha-M | | | BenignNodules, | Single-pass | Literature |
| | | | | Symptoms | type I | |
| | | | | | membrane | |
| | | | | | protein. | |
| K0090_HUMAN | Uncharacterized | KIAA0090 | EPI | Symptoms | Membrane; | UniProt, |
| | protein | | | | Single-pass | Prediction |
| | KIAA0090 | | | | type I | |
| | | | | | membrane | |
| | | | | | protein | |
| | | | | | (Potential). | |
| K1C18_HUMAN | Keratin, | KRT18 | Secreted | LungCancers, | Cytoplasm, | Literature, |
| | type I | | | BenignNodules | perinuclear | Detection, |
| | cytoskeletal | | | | region. | Prediction |
| | 18 | | | | | |
| K1C19_HUMAN | Keratin, | KRT19 | | LungCancers, | | Literature, |
| | type I | | | BenignNodules | | Detection, |
| | cytoskeletal | | | | | Prediction |
| | 19 | | | | | |
| K2C8_HUMAN | Keratin, | KRT8 | EPI | LungCancers | Cytoplasm. | Literature, |
| | type II | | | | | Detection |
| | cytoskeletal 8 | | | | | |
| KIT_HUMAN | Mast/stem | KIT | | LungCancers | Membrane; | UniProt, |
| | cell growth | | | | Single-pass | Literature, |
| | factor | | | | type I | Detection |
| | receptor | | | | membrane | |
| | | | | | protein. | |
| KITH_HUMAN | Thymidine | TK1 | | LungCancers | Cytoplasm. | Literature, |
| | kinase, | | | | | Prediction |
| | cytosolic | | | | | |
| KLK11_HUMAN | Kallikrein- | KLK11 | | LungCancers | Secreted. | UniProt, |
| | 11 | | | | | Literature, |
| | | | | | | Prediction |
| KLK13_HUMAN | Kallikrein- | KLK13 | | LungCancers | Secreted | UniProt, |
| | 13 | | | | (Probable). | Literature, |
| | | | | | | Detection, |
| | | | | | | Prediction |
| KLK14_HUMAN | Kallikrein- | KLK14 | | LungCancers, | Secreted, | UniProt, |
| | 14 | | | Symptoms | extracellular | Literature, |
| | | | | | space. | Prediction |
| KLK6_HUMAN | Kallikrein-6 | KLK6 | | LungCancers, | Secreted. | UniProt, |
| | | | | BenignNodules, | Nucleus, | Literature, |
| | | | | Symptoms | nucleolus. | Detection, |
| | | | | | Cytoplasm. | Prediction |
| | | | | | Mitochondrion. | |
| | | | | | Microsome. | |
| | | | | | Note = In brain, | |
| | | | | | detected in the | |
| | | | | | nucleus of glial | |
| | | | | | cells and in the | |
| | | | | | nucleus and | |
| | | | | | cytoplasm of | |
| | | | | | neurons. | |
| | | | | | Detected in the | |
| | | | | | mitochondrial | |
| | | | | | and microsomal | |
| | | | | | fractions of | |
| | | | | | HEK-293 cells | |
| | | | | | and released | |
| | | | | | into the | |
| | | | | | cytoplasm | |
| | | | | | following cell | |
| | | | | | stress. | |
| KNG1_HUMAN | Kininogen-1 | KNG1 | | LungCancers, | Secreted, | UniProt, |
| | | | | BenignNodules, | extracellular | Detection, |
| | | | | Symptoms | space. | Prediction |
| KPYM_HUMAN | Pyruvate | PKM2 | Secreted, | LungCancers, | Cytoplasm. | Literature, |
| | kinase | | EPI | Symptoms | Nucleus. | Detection |
| | isozymes | | | | Note = Translocates | |
| | M1/M2 | | | | to the | |
| | | | | | nucleus in | |
| | | | | | response to | |
| | | | | | different | |
| | | | | | apoptotic | |
| | | | | | stimuli. Nuclear | |
| | | | | | translocation is | |
| | | | | | sufficient to | |
| | | | | | induce cell | |
| | | | | | death that is | |
| | | | | | caspase | |
| | | | | | independent, | |
| | | | | | isoform-specific | |
| | | | | | and | |
| | | | | | independent of | |
| | | | | | its enzymatic | |
| | | | | | actvity. | |
| KRT35_HUMAN | Keratin, | KRT35 | ENDO | | | Detection, |
| | type I | | | | | Prediction |
| | cuticular | | | | | |
| | Ha5 | | | | | |
| LAMB2_HUMAN | Laminin | LAMB2 | ENDO | LungCancers, | Secreted, | UniProt, |
| | subunit | | | Symptoms | extracellular | Detection, |
| | beta-2 | | | | space, | Prediction |
| | | | | | extracellular | |
| | | | | | matrix, | |
| | | | | | basement | |
| | | | | | membrane. | |
| | | | | | Note = S-laminin | |
| | | | | | is concentrated | |
| | | | | | in the synaptic | |
| | | | | | cleft of the | |
| | | | | | neuromuscular | |
| | | | | | junction. | |
| LDHA_HUMAN | L-lactate | LDHA | Secreted, | LungCancers | Cytoplasm. | Literature, |
| | dehydrogenase | | EPI, ENDO | | | Detection, |
| | A chain | | | | | Prediction |
| LDHB_HUMAN | L-lactate | LDHB | EPI | LungCancers | Cytoplasm. | Detection, |
| | dehydrogenase | | | | | Prediction |
| | B chain | | | | | |
| LEG1_HUMAN | Galectin-1 | LGALS1 | Secreted | LungCancers | Secreted, | UniProt, |
| | | | | | extracellular | Detection |
| | | | | | space, | |
| | | | | | extracellular | |
| | | | | | matrix. | |
| LEG3_HUMAN | Galectin-3 | LGALS3 | | LungCancers, | Nucleus. | Literature, |
| | | | | BenignNodules | Note = Cytoplasmic | Detection, |
| | | | | | in | Prediction |
| | | | | | adenomas and | |
| | | | | | carcinomas. | |
| | | | | | May be secreted | |
| | | | | | by a non- | |
| | | | | | classical | |
| | | | | | secretory | |
| | | | | | pathway and | |
| | | | | | associate with | |
| | | | | | the cell surface. | |
| LEG9_HUMAN | Galectin-9 | LGALS9 | ENDO | Symptoms | Cytoplasm (By | UniProt |
| | | | | | similarity). | |
| | | | | | Secreted (By | |
| | | | | | similarity). | |
| | | | | | Note = May also | |
| | | | | | be secreted by a | |
| | | | | | non-classical | |
| | | | | | secretory | |
| | | | | | pathway (By | |
| | | | | | similarity). | |
| LG3BP_HUMAN | Galectin-3- | LGALS3BP | Secreted | LungCancers, | Secreted. | UniProt, |
| | binding | | | BenignNodules, | Secreted, | Literature, |
| | protein | | | Symptoms | extracellular | Detection, |
| | | | | | space, | Prediction |
| | | | | | extracellular | |
| | | | | | matrix. | |
| LPLC3_HUMAN | Long | C20orf185 | | LungCancers | Secreted (By | UniProt, |
| | palate, lung | | | | similarity). | Prediction |
| | and nasal | | | | Cytoplasm. | |
| | epithelium | | | | Note = According | |
| | carcinoma- | | | | to | |
| | associated | | | | PubMed: 12837268 | |
| | protein 3 | | | | it is | |
| | | | | | cytoplasmic. | |
| LPLC4_HUMAN | Long | C20orf186 | | LungCancers | Secreted (By | UniProt, |
| | palate, lung | | | | similarity). | Prediction |
| | and nasal | | | | Cytoplasm. | |
| | epithelium | | | | | |
| | carcinoma- | | | | | |
| | associated | | | | | |
| | protein 4 | | | | | |
| LPPRC_HUMAN | Leucine- | LRPPRC | Secreted, | LungCancers, | Mitochondrion. | Prediction |
| | rich PPR | | ENDO | Symptoms | Nucleus, | |
| | motif- | | | | nucleoplasm. | |
| | containing | | | | Nucleus inner | |
| | protein, | | | | membrane. | |
| | mitochondrial | | | | Nucleus outer | |
| | | | | | membrane. | |
| | | | | | Note = Seems to | |
| | | | | | be | |
| | | | | | predominantly | |
| | | | | | mitochondrial. | |
| LRP1_HUMAN | Prolow- | LRP1 | EPI | LungCancers, | Low-density | UniProt, |
| | density | | | Symptoms | lipoprotein | Detection |
| | lipoprotein | | | | receptor-related | |
| | receptor- | | | | protein 1 85 kDa | |
| | related | | | | subunit: | |
| | protein 1 | | | | Cell membrane; | |
| | | | | | Single-pass | |
| | | | | | type I | |
| | | | | | membrane | |
| | | | | | protein. | |
| | | | | | Membrane, | |
| | | | | | coated pit.\|Low- | |
| | | | | | density | |
| | | | | | lipoprotein | |
| | | | | | receptor-related | |
| | | | | | protein 1 515 kDa | |
| | | | | | subunit: | |
| | | | | | Cell membrane; | |
| | | | | | Peripheral | |
| | | | | | membrane | |
| | | | | | protein; | |
| | | | | | Extracellular | |
| | | | | | side. | |
| | | | | | Membrane, | |
| | | | | | coated pit.\|Low- | |
| | | | | | density | |
| | | | | | lipoprotein | |
| | | | | | receptor-related | |
| | | | | | protein 1 | |
| | | | | | intracellular | |
| | | | | | domain: | |
| | | | | | Cytoplasm. | |
| | | | | | Nucleus. | |
| | | | | | Note = After | |
| | | | | | cleavage, the | |
| | | | | | intracellular | |
| | | | | | domain | |
| | | | | | (LRPICD) is | |
| | | | | | detected both in | |
| | | | | | the cytoplasm | |
| | | | | | and in the | |
| | | | | | nucleus. | |
| LUM_HUMAN | Lumican | LUM | Secreted, | LungCancers, | Secreted, | UniProt, |
| | | | EPI | BenignNodules, | extracellular | Detection, |
| | | | | Symptoms | space, | Prediction |
| | | | | | extracellular | |
| | | | | | matrix (By | |
| | | | | | similarity). | |
| LY6K_HUMAN | Lymphocyte | LY6K | | LungCancers, | Secreted. | UniProt, |
| | antigen | | | Symptoms | Cytoplasm. Cell | Prediction |
| | 6K | | | | membrane; | |
| | | | | | Lipid-anchor, | |
| | | | | | GPI-anchor | |
| | | | | | (Potential). | |
| LYAM2_HUMAN | E-selectin | SELE | | LungCancers, | Membrane; | UniProt, |
| | | | | BenignNodules, | Single-pass | Literature, |
| | | | | Symptoms | type I | Detection |
| | | | | | membrane | |
| | | | | | protein. | |
| LYAM3_HUMAN | P-selectin | SELP | | LungCancers, | Membrane; | UniProt, |
| | | | | BenignNodules, | Single-pass | Literature, |
| | | | | Symptoms | type I | Detection |
| | | | | | membrane | |
| | | | | | protein. | |
| LYOX_HUMAN | Protein- | LOX | | LungCancers, | Secreted, | UniProt, |
| | lysine 6- | | | BenignNodules | extracellular | Detection, |
| | oxidase | | | | space. | Prediction |
| LYPD3_HUMAN | Ly6/PLAUR | LYPD3 | | LungCancers | Cell membrane; | Detection, |
| | domain- | | | | Lipid-anchor, | Prediction |
| | containing | | | | GPI-anchor. | |
| | protein 3 | | | | | |
| MAGA4_HUMAN | Melanoma- | MAGEA4 | | LungCancers | | Literature, |
| | associated | | | | | Prediction |
| | antigen 4 | | | | | |
| MASP1_HUMAN | Mannan- | MASP1 | | LungCancers, | Secreted. | UniProt, |
| | binding | | | Symptoms | | Detection, |
| | lectin | | | | | Prediction |
| | serine | | | | | |
| | protease 1 | | | | | |
| MDHC_HUMAN | Malate | MDH1 | Secreted | | Cytoplasm. | Literature, |
| | dehydrogenase, | | | | | Detection, |
| | cytoplasmic | | | | | Prediction |
| MDHM_HUMAN | Malate | MDH2 | ENDO | LungCancers | Mitochondrion | Detection, |
| | dehydrogenase, | | | | matrix. | Prediction |
| | mitochondrial | | | | | |
| MIF_HUMAN | Macrophage | MIF | Secreted | LungCancers, | Secreted. | UniProt, |
| | migration | | | BenignNodules, | Cytoplasm. | Literature, |
| | inhibitory | | | Symptoms | Note = Does not | Prediction |
| | factor | | | | have a | |
| | | | | | cleavable signal | |
| | | | | | sequence and is | |
| | | | | | secreted via a | |
| | | | | | specialized, | |
| | | | | | non-classical | |
| | | | | | pathway. | |
| | | | | | Secreted by | |
| | | | | | macrophages | |
| | | | | | upon | |
| | | | | | stimulation by | |
| | | | | | bacterial | |
| | | | | | lipopolysaccharide | |
| | | | | | (LPS), or by | |
| | | | | | M. tuberculosis | |
| | | | | | antigens. | |
| MLH1_HUMAN | DNA | MLH1 | ENDO | LungCancers, | Nucleus. | Literature |
| | mismatch | | | BenignNodules, | | |
| | repair | | | Symptoms | | |
| | protein | | | | | |
| | Mlh1 | | | | | |
| MMP1_HUMAN | Interstitial | MMP1 | | LungCancers, | Secreted, | UniProt, |
| | collagenase | | | BenignNodules, | extracellular | Literature, |
| | | | | Symptoms | space, | Prediction |
| | | | | | extracellular | |
| | | | | | matrix | |
| | | | | | (Probable). | |
| MMP11_HUMAN | Stromelysin-3 | MMP11 | | LungCancers, | Secreted, | UniProt, |
| | | | | Symptoms | extracellular | Literature, |
| | | | | | space, | Prediction |
| | | | | | extracellular | |
| | | | | | matrix | |
| | | | | | (Probable). | |
| MMP12_HUMAN | Macrophage | MMP12 | | LungCancers, | Secreted, | UniProt, |
| | metalloelastase | | | BenignNodules, | extracellular | Literature, |
| | | | | Symptoms | space, | Prediction |
| | | | | | extracellular | |
| | | | | | matrix | |
| | | | | | (Probable). | |
| MMP14_HUMAN | Matrix | MMP14 | ENDO | LungCancers, | Membrane; | UniProt, |
| | metalloproteinase- | | | BenignNodules, | Single-pass | Literature, |
| | 14 | | | Symptoms | type I | Detection |
| | | | | | membrane | |
| | | | | | protein | |
| | | | | | (Potential). | |
| | | | | | Melanosome. | |
| | | | | | Note = Identified | |
| | | | | | by mass | |
| | | | | | spectrometry in | |
| | | | | | melanosome | |
| | | | | | fractions from | |
| | | | | | stage I to stage | |
| | | | | | IV. | |
| MMP2_HUMAN | 72 kDa | MMP2 | | LungCancers, | Secreted, | UniProt, |
| | type IV | | | BenignNodules, | extracellular | Literature, |
| | collagenase | | | Symptoms | space, | Detection, |
| | | | | | extracellular | Prediction |
| | | | | | matrix | |
| | | | | | (Probable). | |
| MMP26_HUMAN | Matrix | MMP26 | | LungCancers | Secreted, | UniProt, |
| | metalloproteinase- | | | | extracellular | Prediction |
| | 26 | | | | space, | |
| | | | | | extracellular | |
| | | | | | matrix. | |
| MMP7_HUMAN | Matrilysin | MMP7 | | LungCancers, | Secreted, | UniProt, |
| | | | | BenignNodules, | extracellular | Literature, |
| | | | | Symptoms | space, | Prediction |
| | | | | | extracellular | |
| | | | | | matrix | |
| | | | | | (Probable). | |
| MMP9_HUMAN | Matrix | MMP9 | | LungCancers, | Secreted, | UniProt, |
| | metalloproteinase-9 | | | BenignNodules, | extracellular | Literature, |
| | | | | Symptoms | space, | Detection, |
| | | | | | extracellular | Prediction |
| | | | | | matrix | |
| | | | | | (Probable). | |
| MOGS_HUMAN | Mannosyl- | MOGS | ENDO | | Endoplasmic | UniProt, |
| | oligosaccharide | | | | reticulum | Prediction |
| | glucosidase | | | | membrane; | |
| | | | | | Single-pass | |
| | | | | | type II | |
| | | | | | membrane | |
| | | | | | protein. | |
| MPRI_HUMAN | Cation- | IGF2R | EPI, ENDO | LungCancers, | Lysosome | UniProt, |
| | independent | | | Symptoms | membrane; | Literature, |
| | mannose- | | | | Single-pass | Detection |
| | 6- | | | | type I | |
| | phosphate | | | | membrane | |
| | receptor | | | | protein. | |
| MRP3_HUMAN | Canalicular | ABCC3 | EPI | LungCancers | Membrane; | Literature, |
| | multispecific | | | | Multi-pass | Detection |
| | organic | | | | membrane | |
| | anion | | | | protein. | |
| | transporter 2 | | | | | |
| MUC1_HUMAN | Mucin-1 | MUC1 | EPI | LungCancers, | Apical cell | UniProt, |
| | | | | BenignNodules, | membrane; | Literature, |
| | | | | Symptoms | Single-pass | Prediction |
| | | | | | type I | |
| | | | | | membrane | |
| | | | | | protein. | |
| | | | | | Note = Exclusively | |
| | | | | | located in the | |
| | | | | | apical domain | |
| | | | | | of the plasma | |
| | | | | | membrane of | |
| | | | | | highly polarized | |
| | | | | | epithelial cells. | |
| | | | | | After | |
| | | | | | endocytosis, | |
| | | | | | internalized and | |
| | | | | | recycled to the | |
| | | | | | cell membrane. | |
| | | | | | Located to | |
| | | | | | microvilli and | |
| | | | | | to the tips of | |
| | | | | | long filopodial | |
| | | | | | protusions.\|Isoform | |
| | | | | | 5: | |
| | | | | | Secreted.\|Isoform | |
| | | | | | 7: | |
| | | | | | Secreted.\|Isoform | |
| | | | | | 9: | |
| | | | | | Secreted.\|Mucin- | |
| | | | | | 1 subunit beta: | |
| | | | | | Cell membrane. | |
| | | | | | Cytoplasm. | |
| | | | | | Nucleus. | |
| | | | | | Note = On EGF | |
| | | | | | and PDGFRB | |
| | | | | | stimulation, | |
| | | | | | transported to | |
| | | | | | the nucleus | |
| | | | | | through | |
| | | | | | interaction with | |
| | | | | | CTNNB1, a | |
| | | | | | process which | |
| | | | | | is stimulated by | |
| | | | | | phosphorylation. | |
| | | | | | On HRG | |
| | | | | | stimulation, | |
| | | | | | colocalizes with | |
| | | | | | JUP/gamma- | |
| | | | | | catenin at the | |
| | | | | | nucleus. | |
| MUC16_HUMAN | Mucin-16 | MUC16 | | LungCancers | Cell membrane; | UniProt, |
| | | | | | Single-pass | Detection |
| | | | | | type I | |
| | | | | | membrane | |
| | | | | | protein. | |
| | | | | | Secreted, | |
| | | | | | extracellular | |
| | | | | | space. | |
| | | | | | Note = May be | |
| | | | | | liberated into | |
| | | | | | the extracellular | |
| | | | | | space following | |
| | | | | | the | |
| | | | | | phosphorylation | |
| | | | | | of the | |
| | | | | | intracellular C- | |
| | | | | | terminus which | |
| | | | | | induces the | |
| | | | | | proteolytic | |
| | | | | | cleavage and | |
| | | | | | liberation of the | |
| | | | | | extracellular | |
| | | | | | domain. | |
| MUC4_HUMAN | Mucin-4 | MUC4 | | LungCancers, | Membrane; | UniProt |
| | | | | BenignNodules | Single-pass | |
| | | | | | membrane | |
| | | | | | protein | |
| | | | | | (Potential). | |
| | | | | | Secreted. | |
| | | | | | Note = Isoforms | |
| | | | | | lacking the Cys- | |
| | | | | | rich region, | |
| | | | | | EGF-like | |
| | | | | | domains and | |
| | | | | | transmembrane | |
| | | | | | region are | |
| | | | | | secreted. | |
| | | | | | Secretion | |
| | | | | | occurs by | |
| | | | | | splicing or | |
| | | | | | proteolytic | |
| | | | | | processing.\|Mucin- | |
| | | | | | 4 beta chain: | |
| | | | | | Cell membrane; | |
| | | | | | Single-pass | |
| | | | | | membrane | |
| | | | | | protein.\|Mucin- | |
| | | | | | 4 alpha chain: | |
| | | | | | Secreted.\|Isoform | |
| | | | | | 3: Cell | |
| | | | | | membrane; | |
| | | | | | Single-pass | |
| | | | | | membrane | |
| | | | | | protein.\|Isoform | |
| | | | | | 15: Secreted. | |
| MUC5B_HUMAN | Mucin-5B | MUC5B | | LungCancers, | Secreted. | UniProt, |
| | | | | BenignNodules | | Detection, |
| | | | | | | Prediction |
| MUCL1_HUMAN | Mucin-like | MUCL1 | | LungCancers | Secreted | UniProt, |
| | protein 1 | | | | (Probable). | Prediction |
| | | | | | Membrane | |
| | | | | | (Probable). | |
| NAMPT_HUMAN | Nicotinamide | NAMPT | EPI | LungCancers, | Cytoplasm (By | Literature, |
| | phosphoribosyltransferase | | | BenignNodules, | similarity). | Detection |
| | | | | Symptoms | | |
| NAPSA_HUMAN | Napsin-A | NAPSA | Secreted | LungCancers | | Prediction |
| NCF4_HUMAN | Neutrophil | NCF4 | ENDO | | Cytoplasm. | Prediction |
| | cytosol | | | | | |
| | factor 4 | | | | | |
| NDKA_HUMAN | Nucleoside | NME1 | Secreted | LungCancers, | Cytoplasm. | Literature, |
| | diphosphate | | | BenignNodules, | Nucleus. | Detection |
| | kinase A | | | Symptoms | Note = Cell- | |
| | | | | | cycle dependent | |
| | | | | | nuclear | |
| | | | | | localization | |
| | | | | | which can be | |
| | | | | | induced by | |
| | | | | | interaction with | |
| | | | | | Epstein-barr | |
| | | | | | viral proteins or | |
| | | | | | by degradation | |
| | | | | | of the SET | |
| | | | | | complex by | |
| | | | | | GzmA. | |
| NDKB_HUMAN | Nucleoside | NME2 | Secreted, | BenignNodules | Cytoplasm. | Literature, |
| | diphosphate | | EPI | | Nucleus. | Detection |
| | kinase B | | | | Note = Isoform 2 | |
| | | | | | is mainly | |
| | | | | | cytoplasmic and | |
| | | | | | isoform 1 and | |
| | | | | | isoform 2 are | |
| | | | | | excluded from | |
| | | | | | the nucleolus. | |
| NDUS1_HUMAN | NADH- | NDUFS1 | Secreted, | Symptoms | Mitochondrion | Prediction |
| | ubiquinone | | ENDO | | inner | |
| | oxidoreductase | | | | membrane. | |
| | 75 kDa | | | | | |
| | subunit, | | | | | |
| | mitochondrial | | | | | |
| NEBL_HUMAN | Nebulette | NEBL | ENDO | | | Prediction |
| NEK4_HUMAN | Serine/threonine- | NEK4 | ENDO | LungCancers | Nucleus | Prediction |
| | protein | | | | (Probable). | |
| | kinase | | | | | |
| | Nek4 | | | | | |
| NET1_HUMAN | Netrin-1 | NTN1 | | LungCancers, | Secreted, | UniProt, |
| | | | | BenignNodules | extracellular | Literature, |
| | | | | | space, | Prediction |
| | | | | | extracellular | |
| | | | | | matrix (By | |
| | | | | | similarity). | |
| NEU2_HUMAN | Vasopressin- | AVP | | LungCancers, | Secreted. | UniProt, |
| | neurophysin | | | Symptoms | | Prediction |
| | 2- | | | | | |
| | copeptin | | | | | |
| NGAL_HUMAN | Neutrophil | LCN2 | EPI | LungCancers, | Secreted. | UniProt, |
| | gelatinase- | | | BenignNodules, | | Detection, |
| | associated | | | Symptoms | | Prediction |
| | lipocalin | | | | | |
| NGLY1_HUMAN | Peptide- | NGLY1 | ENDO | | Cytoplasm. | Detection, |
| | N(4)-(N- | | | | | Prediction |
| | acetyl-beta- | | | | | |
| | glucosaminyl)asparagine | | | | | |
| | amidase | | | | | |
| NHRF1_HUMAN | Na(+)/H(+) | SLC9A3R1 | EPI | BenignNodules | Endomembrane | Detection |
| | exchange | | | | system; | |
| | regulatory | | | | Peripheral | |
| | cofactor | | | | membrane | |
| | NHE-RF1 | | | | protein. Cell | |
| | | | | | projection, | |
| | | | | | filopodium. | |
| | | | | | Cell projection, | |
| | | | | | ruffle. Cell | |
| | | | | | projection, | |
| | | | | | microvillus. | |
| | | | | | Note = Colocalizes | |
| | | | | | with actin in | |
| | | | | | microvilli-rich | |
| | | | | | apical regions | |
| | | | | | of the | |
| | | | | | syncytiotrophoblast. | |
| | | | | | Found in | |
| | | | | | microvilli, | |
| | | | | | ruffling | |
| | | | | | membrane and | |
| | | | | | filopodia of | |
| | | | | | HeLa cells. | |
| | | | | | Present in lipid | |
| | | | | | rafts of T-cells. | |
| NIBAN_HUMAN | Protein | FAM129A | EPI | | Cytoplasm. | Literature, |
| | Niban | | | | | Detection |
| NMU_HUMAN | Neuromedin-U | NMU | | LungCancers | Secreted. | UniProt, |
| | | | | | | Prediction |
| NRP1_HUMAN | Neuropilin-1 | NRP1 | | LungCancers, | Cell membrane; | UniProt, |
| | | | | BenignNodules, | Single-pass | Literature, |
| | | | | Symptoms | type I | Detection, |
| | | | | | membrane | Prediction |
| | | | | | protein.\|Isoform | |
| | | | | | 2: Secreted. | |
| ODAM_HUMAN | Odontogenic | ODAM | | LungCancers | Secreted (By | UniProt, |
| | ameloblast- | | | | similarity). | Prediction |
| | associated | | | | | |
| | protein | | | | | |
| OSTP_HUMAN | Osteopontin | SPP1 | | LungCancers, | Secreted. | UniProt, |
| | | | | BenignNodules, | | Literature, |
| | | | | Symptoms | | Detection, |
| | | | | | | Prediction |
| OVOS2_HUMAN | Ovostatin | OVOS2 | ENDO | | Secreted (By | UniProt, |
| | homolog 2 | | | | similarity). | Prediction |
| P5CS_HUMAN | Delta-1- | ALDH18A1 | ENDO | | Mitochondrion | Prediction |
| | pyrroline- | | | | inner | |
| | 5- | | | | membrane. | |
| | carboxylate | | | | | |
| | synthase | | | | | |
| PA2GX_HUMAN | Group 10 | PLA2G10 | | Symptoms | Secreted. | UniProt |
| | secretory | | | | | |
| | phospholipase | | | | | |
| | A2 | | | | | |
| PAPP1_HUMAN | Pappalysin-1 | PAPPA | | LungCancers, | Secreted. | UniProt, |
| | | | | BenignNodules, | | Literature, |
| | | | | Symptoms | | Prediction |
| PBIP1_HUMAN | Pre-B-cell | PBXIP1 | EPI | | Cytoplasm, | Prediction |
| | leukemia | | | | cytoskeleton. | |
| | transcription | | | | Nucleus. | |
| | factor- | | | | Note = Shuttles | |
| | interacting | | | | between the | |
| | protein 1 | | | | nucleus and the | |
| | | | | | cytosol. Mainly | |
| | | | | | localized in the | |
| | | | | | cytoplasm, | |
| | | | | | associated with | |
| | | | | | microtubules. | |
| | | | | | Detected in | |
| | | | | | small amounts | |
| | | | | | in the nucleus. | |
| PCBP1_HUMAN | Poly(rC)- | PCBP1 | EPI, ENDO | | Nucleus. | Detection, |
| | binding | | | | Cytoplasm. | Prediction |
| | protein 1 | | | | Note = Loosely | |
| | | | | | bound in the | |
| | | | | | nucleus. May | |
| | | | | | shuttle between | |
| | | | | | the nucleus and | |
| | | | | | the cytoplasm. | |
| PCBP2_HUMAN | Poly(rC)- | PCBP2 | EPI | | Nucleus. | Detection, |
| | binding | | | | Cytoplasm. | Prediction |
| | protein 2 | | | | Note = Loosely | |
| | | | | | bound in the | |
| | | | | | nucleus. May | |
| | | | | | shuttle between | |
| | | | | | the nucleus and | |
| | | | | | the cytoplasm. | |
| PCD15_HUMAN | Protocadherin- | PCDH15 | ENDO | | Cell membrane; | UniProt, |
| | 15 | | | | Single-pass | Detection |
| | | | | | type I | |
| | | | | | membrane | |
| | | | | | protein (By | |
| | | | | | similarity).\|Isoform | |
| | | | | | 3: | |
| | | | | | Secreted. | |
| PCNA_HUMAN | Proliferating | PCNA | EPI | LungCancers, | Nucleus. | Literature, |
| | cell | | | BenignNodules, | | Prediction |
| | nuclear | | | Symptoms | | |
| | antigen | | | | | |
| PCYOX_HUMAN | Prenylcysteine | PCYOX1 | Secreted | LungCancers, | Lysosome. | Detection, |
| | oxidase 1 | | | Symptoms | | Prediction |
| PDGFA_HUMAN | Platelet- | PDGFA | | LungCancers | Secreted. | UniProt, |
| | derived | | | | | Literature, |
| | growth | | | | | Prediction |
| | factor | | | | | |
| | subunit A | | | | | |
| PDGFB_HUMAN | Platelet- | PDGFB | | LungCancers, | Secreted. | UniProt, |
| | derived | | | BenignNodules, | | Literature, |
| | growth | | | Symptoms | | Detection, |
| | factor | | | | | Prediction |
| | subunit B | | | | | |
| PDGFD_HUMAN | Platelet- | PDGFD | | LungCancers | Secreted. | UniProt, |
| | derived | | | | | Prediction |
| | growth | | | | | |
| | factor D | | | | | |
| PDIA3_HUMAN | Protein | PDIA3 | ENDO | LungCancers | Endoplasmic | Detection, |
| | disulfide- | | | | reticulum | Prediction |
| | isomerase | | | | lumen (By | |
| | A3 | | | | similarity). | |
| | | | | | Melanosome. | |
| | | | | | Note = Identified | |
| | | | | | by mass | |
| | | | | | spectrometry in | |
| | | | | | melanosome | |
| | | | | | fractions from | |
| | | | | | stage I to stage | |
| | | | | | IV. | |
| PDIA4_HUMAN | Protein | PDIA4 | Secreted, | | Endoplasmic | Detection, |
| | disulfide- | | EPI, ENDO | | reticulum | Prediction |
| | isomerase | | | | lumen. | |
| | A4 | | | | Melanosome. | |
| | | | | | Note = Identified | |
| | | | | | by mass | |
| | | | | | spectrometry in | |
| | | | | | melanosome | |
| | | | | | fractions from | |
| | | | | | stage I to stage | |
| | | | | | IV. | |
| PDIA6_HUMAN | Protein | PDIA6 | Secreted, | | Endoplasmic | Detection, |
| | disulfide- | | EPI, ENDO | | reticulum | Prediction |
| | isomerase | | | | lumen (By | |
| | A6 | | | | similarity). | |
| | | | | | Melanosome. | |
| | | | | | Note = Identified | |
| | | | | | by mass | |
| | | | | | spectrometry in | |
| | | | | | melanosome | |
| | | | | | fractions from | |
| | | | | | stage I to stage | |
| | | | | | IV. | |
| PECA1_HUMAN | Platelet | PECAM1 | | LungCancers, | Membrane; | UniProt, |
| | endothelial | | | BenignNodules, | Single-pass | Literature, |
| | cell | | | Symptoms | type I | Detection |
| | adhesion | | | | membrane | |
| | molecule | | | | protein. | |
| PEDF_HUMAN | Pigment | SERPINF1 | | LungCancers, | Secreted. | UniProt, |
| | epithelium- | | | Symptoms | Melanosome. | Literature, |
| | derived | | | | Note = Enriched | Detection, |
| | factor | | | | in stage I | Prediction |
| | | | | | melanosomes. | |
| PERM_HUMAN | Myeloperoxidase | MPO | Secreted, | LungCancers, | Lysosome. | Literature, |
| | | | EPI, ENDO | BenignNodules, | | Detection |
| | | | | Symptoms | | Prediction |
| PERP1_HUMAN | Plasma | PACAP | EPI, ENDO | | Secreted | UniProt, |
| | cell- | | | | (Potential). | Detection, |
| | induced | | | | Cytoplasm. | Prediction |
| | resident | | | | Note = In | |
| | endoplasmic | | | | (PubMed: 11350957) | |
| | reticulum | | | | diffuse | |
| | protein | | | | granular | |
| | | | | | localization in | |
| | | | | | the cytoplasm | |
| | | | | | surrounding the | |
| | | | | | nucleus. | |
| PGAM1_HUMAN | Phosphoglycerate | PGAM1 | Secreted, | LungCancers, | | Detection |
| | mutase 1 | | EPI | Symptoms | | |
| PLAC1_HUMAN | Placenta- | PLAC1 | | LungCancers | Secreted | UniProt, |
| | specific | | | | (Probable). | Prediction |
| | protein 1 | | | | | |
| PLACL_HUMAN | Placenta- | PLAC1L | | LungCancers | Secreted | UniProt, |
| | specific 1- | | | | (Potential). | Prediction |
| | like protein | | | | | |
| PLIN2_HUMAN | Perilipin-2 | ADFP | ENDO | LungCancers | Membrane; | Prediction |
| | | | | | Peripheral | |
| | | | | | membrane | |
| | | | | | protein. | |
| PLIN3_HUMAN | Perilipin-3 | M6PRBP1 | EPI | | Cytoplasm. | Detection, |
| | | | | | Endosome | Prediction |
| | | | | | membrane; | |
| | | | | | Peripheral | |
| | | | | | membrane | |
| | | | | | protein; | |
| | | | | | Cytoplasmic | |
| | | | | | side (Potential). | |
| | | | | | Lipid droplet | |
| | | | | | (Potential). | |
| | | | | | Note = Membrane | |
| | | | | | associated on | |
| | | | | | endosomes. | |
| | | | | | Detected in the | |
| | | | | | envelope and | |
| | | | | | the core of lipid | |
| | | | | | bodies and in | |
| | | | | | lipid sails. | |
| PLOD1_HUMAN | Procollagen- | PLOD1 | EPI, ENDO | | Rough | Prediction |
| | lysine,2- | | | | endoplasmic | |
| | oxoglutarate | | | | reticulum | |
| | 5- | | | | membrane; | |
| | dioxygenase 1 | | | | Peripheral | |
| | | | | | membrane | |
| | | | | | protein; | |
| | | | | | Lumenal side. | |
| PLOD2_HUMAN | Procollagen- | PLOD2 | ENDO | BenignNodules, | Rough | Prediction |
| | lysine,2- | | | Symptoms | endoplasmic | |
| | oxoglutarate | | | | reticulum | |
| | 5- | | | | membrane; | |
| | dioxygenase 2 | | | | Peripheral | |
| | | | | | membrane | |
| | | | | | protein; | |
| | | | | | Lumenal side. | |
| PLSL_HUMAN | Plastin-2 | LCP1 | Secreted, | LungCancers | Cytoplasm, | Detection, |
| | | | EPI | | cytoskeleton. | Prediction |
| | | | | | Cell junction. | |
| | | | | | Cell projection. | |
| | | | | | Cell projection, | |
| | | | | | ruffle | |
| | | | | | membrane; | |
| | | | | | Peripheral | |
| | | | | | membrane | |
| | | | | | protein; | |
| | | | | | Cytoplasmic | |
| | | | | | side (By | |
| | | | | | similarity). | |
| | | | | | Note = Relocalizes | |
| | | | | | to the | |
| | | | | | immunological | |
| | | | | | synapse | |
| | | | | | between | |
| | | | | | peripheral | |
| | | | | | blood T | |
| | | | | | lymphocytes | |
| | | | | | and antibody- | |
| | | | | | presenting cells | |
| | | | | | in response to | |
| | | | | | costimulation | |
| | | | | | through | |
| | | | | | TCR/CD3 and | |
| | | | | | CD2 or CD28. | |
| | | | | | Associated with | |
| | | | | | the actin | |
| | | | | | cytoskeleton at | |
| | | | | | membrane | |
| | | | | | ruffles (By | |
| | | | | | similarity). | |
| | | | | | Relocalizes to | |
| | | | | | actin-rich cell | |
| | | | | | projections | |
| | | | | | upon serine | |
| | | | | | phosphorylation. | |
| PLUNC_HUMAN | Protein | PLUNC | | LungCancers, | Secreted (By | UniProt, |
| | Plunc | | | BenignNodules | similarity). | Prediction |
| | | | | | Note = Found in | |
| | | | | | the nasal mucus | |
| | | | | | (By similarity). | |
| | | | | | Apical side of | |
| | | | | | airway | |
| | | | | | epithelial cells. | |
| | | | | | Detected in | |
| | | | | | nasal mucus | |
| | | | | | (By similarity). | |
| PLXB3_HUMAN | Plexin-B3 | PLXNB3 | ENDO | | Membrane; | UniProt, |
| | | | | | Single-pass | Detection, |
| | | | | | type I | Prediction |
| | | | | | membrane | |
| | | | | | protein. | |
| PLXC1_HUMAN | Plexin-C1 | PLXNC1 | EPI | | Membrane; | UniProt, |
| | | | | | Single-pass | Detection |
| | | | | | type I | |
| | | | | | membrane | |
| | | | | | protein | |
| | | | | | (Potential). | |
| POSTN_HUMAN | Periostin | POSTN | Secreted, | LungCancers, | Secreted, | UniProt, |
| | | | ENDO | BenignNodules, | extracellular | Literature, |
| | | | | Symptoms | space, | Detection, |
| | | | | | extracellular | Prediction |
| | | | | | matrix. | |
| PPAL_HUMAN | Lysosomal | ACP2 | EPI | Symptoms | Lysosome | UniProt, |
| | acid | | | | membrane; | Prediction |
| | phosphatase | | | | Single-pass | |
| | | | | | membrane | |
| | | | | | protein; | |
| | | | | | Lumenal side. | |
| | | | | | Lysosome | |
| | | | | | lumen. | |
| | | | | | Note = The | |
| | | | | | soluble form | |
| | | | | | arises by | |
| | | | | | proteolytic | |
| | | | | | processing of | |
| | | | | | the membrane- | |
| | | | | | bound form. | |
| PPBT_HUMAN | Alkaline | ALPL | EPI | LungCancers, | Cell membrane; | Literature, |
| | phosphatase, | | | BenignNodules, | Lipid-anchor, | Detection, |
| | tissue- | | | Symptoms | GPI-anchor. | Prediction |
| | nonspecific | | | | | |
| | isozyme | | | | | |
| PPIB_HUMAN | Peptidyl- | PPIB | Secreted, | | Endoplasmic | Detection, |
| | prolyl cis- | | EPI, ENDO | | reticulum | Prediction |
| | trans | | | | lumen. | |
| | isomerase B | | | | Melanosome. | |
| | | | | | Note = Identified | |
| | | | | | by mass | |
| | | | | | spectrometry in | |
| | | | | | melanosome | |
| | | | | | fractions from | |
| | | | | | stage I to stage | |
| | | | | | IV. | |
| PRDX1_HUMAN | Peroxiredoxin-1 | PRDX1 | EPI | LungCancers | Cytoplasm. | Detection, |
| | | | | | Melanosome. | Prediction |
| | | | | | Note = Identified | |
| | | | | | by mass | |
| | | | | | spectrometry in | |
| | | | | | melanosome | |
| | | | | | fractions from | |
| | | | | | stage I to stage | |
| | | | | | IV. | |
| PRDX4_HUMAN | Peroxiredoxin-4 | PRDX4 | Secreted, | | Cytoplasm. | Literature, |
| | | | EPI, ENDO | | | Detection, |
| | | | | | | Prediction |
| PROF1_HUMAN | Profilin-1 | PFN1 | Secreted, | LungCancers | Cytoplasm, | Detection |
| | | | EPI | | cytoskeleton. | |
| PRP31_HUMAN | U4/U6 | PRPF31 | ENDO | | Nucleus | Prediction |
| | small | | | | speckle. | |
| | nuclear | | | | Nucleus, Cajal | |
| | ribonucleo | | | | body. | |
| | protein | | | | Note = Predominantly | |
| | Prp31 | | | | found in | |
| | | | | | speckles and in | |
| | | | | | Cajal bodies. | |
| PRS6A_HUMAN | 26S | PSMC3 | EPI | BenignNodules | Cytoplasm | Detection |
| | protease | | | | (Potential). | |
| | regulatory | | | | Nucleus | |
| | subunit 6A | | | | (Potential). | |
| PSCA_HUMAN | Prostate | PSCA | | LungCancers | Cell membrane; | Literature, |
| | stem cell | | | | Lipid-anchor, | Prediction |
| | antigen | | | | GPI-anchor. | |
| PTGIS_HUMAN | Prostacyclin | PTGIS | EPI | LungCancers, | Endoplasmic | UniProt, |
| | synthase | | | BenignNodules | reticulum | Detection, |
| | | | | | membrane; | Prediction |
| | | | | | Single-pass | |
| | | | | | membrane | |
| | | | | | protein. | |
| PTPA_HUMAN | Serine/threonine- | PPP2R4 | ENDO | Symptoms | | Detection, |
| | protein | | | | | Prediction |
| | phosphatase | | | | | |
| | 2A | | | | | |
| | activator | | | | | |
| PTPRC_HUMAN | Receptor- | PTPRC | Secreted, | LungCancers | Membrane; | UniProt, |
| | type | | EPI, ENDO | | Single-pass | Detection, |
| | tyrosine- | | | | type I | Prediction |
| | protein | | | | membrane | |
| | phosphatase C | | | | protein. | |
| PTPRJ_HUMAN | Receptor- | PTPRJ | EPI | LungCancers, | Membrane; | UniProt, |
| | type | | | Symptoms | Single-pass | Detection, |
| | tyrosine- | | | | type I | Prediction |
| | protein | | | | membrane | |
| | phosphatase | | | | protein. | |
| | eta | | | | | |
| PVR_HUMAN | Poliovirus | PVR | | Symptoms | Isoform Alpha: | UniProt, |
| | receptor | | | | Cell membrane; | Detection, |
| | | | | | Single-pass | Prediction |
| | | | | | type I | |
| | | | | | membrane | |
| | | | | | protein.\|Isoform | |
| | | | | | Delta: Cell | |
| | | | | | membrane; | |
| | | | | | Single-pass | |
| | | | | | type I | |
| | | | | | membrane | |
| | | | | | protein.\|Isoform | |
| | | | | | Beta: | |
| | | | | | Secreted.\|Isoform | |
| | | | | | Gamma: | |
| | | | | | Secreted. | |
| RAB32_HUMAN | Ras-related | RAB32 | EPI | | Mitochondrion. | Prediction |
| | protein | | | | | |
| | Rab-32 | | | | | |
| RAGE_HUMAN | Advanced | AGER | Secreted | LungCancers, | Isoform 1: Cell | UniProt, |
| | glycosylation | | | BenignNodules | membrane; | Literature |
| | end | | | | Single-pass | |
| | product- | | | | type I | |
| | specific | | | | membrane | |
| | receptor | | | | protein.\|Isoform | |
| | | | | | 2: Secreted. | |
| RAN_HUMAN | GTP- | RAN | Secreted, | LungCancers, | Nucleus. | Detection, |
| | binding | | EPI | BenignNodules | Cytoplasm. | Prediction |
| | nuclear | | | | Melanosome. | |
| | protein Ran | | | | Note = Becomes | |
| | | | | | dispersed | |
| | | | | | throughout the | |
| | | | | | cytoplasm | |
| | | | | | during mitosis. | |
| | | | | | Identified by | |
| | | | | | mass | |
| | | | | | spectrometry in | |
| | | | | | melanosome | |
| | | | | | fractions from | |
| | | | | | stage I to stage | |
| | | | | | IV. | |
| RAP2B_HUMAN | Ras-related | RAP2B | EPI | | Cell membrane; | Prediction |
| | protein | | | | Lipid-anchor; | |
| | Rap-2b | | | | Cytoplasmic | |
| | | | | | side (Potential). | |
| RAP2C_HUMAN | Ras-related | RAP2C | EPI | | Cell membrane; | Prediction |
| | protein | | | | Lipid-anchor; | |
| | Rap-2c | | | | Cytoplasmic | |
| | | | | | side (Potential). | |
| RCN3_HUMAN | Reticulocalbin-3 | RCN3 | EPI | Symptoms | Endoplasmic | Prediction |
| | | | | | reticulum | |
| | | | | | lumen | |
| | | | | | (Potential). | |
| RL24_HUMAN | 60S | RPL24 | EPI | | | Prediction |
| | ribosomal | | | | | |
| | protein L24 | | | | | |
| S10A1_HUMAN | Protein | S100A1 | | Symptoms | Cytoplasm. | Literature, |
| | S100-A1 | | | | | Prediction |
| S10A6_HUMAN | Protein | S100A6 | Secreted | LungCancers | Nucleus | Literature, |
| | S100-A6 | | | | envelope. | Detection, |
| | | | | | Cytoplasm. | Prediction |
| S10A7_HUMAN | Protein | S100A7 | | LungCancers | Cytoplasm. | UniProt, |
| | S100-A7 | | | | Secreted. | Literature, |
| | | | | | Note = Secreted | Detection, |
| | | | | | by a non- | Prediction |
| | | | | | classical | |
| | | | | | secretory | |
| | | | | | pathway. | |
| SAA_HUMAN | Serum | SAA1 | | Symptoms | Secreted. | UniProt, |
| | amyloid A | | | | | Literature, |
| | protein | | | | | Detection, |
| | | | | | | Prediction |
| SCF_HUMAN | Kit ligand | KITLG | | LungCancers, | Isoform 1: Cell | UniProt, |
| | | | | Symptoms | membrane; | Literature |
| | | | | | Single-pass | |
| | | | | | type I | |
| | | | | | membrane | |
| | | | | | protein (By | |
| | | | | | similarity). | |
| | | | | | Secreted (By | |
| | | | | | similarity). | |
| | | | | | Note = Also | |
| | | | | | exists as a | |
| | | | | | secreted soluble | |
| | | | | | form (isoform 1 | |
| | | | | | only) (By | |
| | | | | | similarity).\|Isoform | |
| | | | | | 2: Cell | |
| | | | | | membrane; | |
| | | | | | Single-pass | |
| | | | | | type I | |
| | | | | | membrane | |
| | | | | | protein (By | |
| | | | | | similarity). | |
| | | | | | Cytoplasm, | |
| | | | | | cytoskeleton | |
| | | | | | (By similarity). | |
| SDC1_HUMAN | Syndecan-1 | SDC1 | | LungCancers, | Membrane; | UniProt, |
| | | | | BenignNodules, | Single-pass | Literature, |
| | | | | Symptoms | type I | Detection |
| | | | | | membrane | |
| | | | | | protein. | |
| SEM3G_HUMAN | Semaphorin- | SEMA3G | | LungCancers | Secreted (By | UniProt, |
| | 3G | | | | similarity). | Prediction |
| SEPR_HUMAN | Seprase | FAP | ENDO | Symptoms | Cell membrane; | UniProt, |
| | | | | | Single-pass | Literature, |
| | | | | | type II | Detection |
| | | | | | membrane | |
| | | | | | protein. Cell | |
| | | | | | projection, | |
| | | | | | lamellipodium | |
| | | | | | membrane; | |
| | | | | | Single-pass | |
| | | | | | type II | |
| | | | | | membrane | |
| | | | | | protein. Cell | |
| | | | | | projection, | |
| | | | | | invadopodium | |
| | | | | | membrane; | |
| | | | | | Single-pass | |
| | | | | | type II | |
| | | | | | membrane | |
| | | | | | protein. | |
| | | | | | Note = Found in | |
| | | | | | cell surface | |
| | | | | | lamellipodia, | |
| | | | | | invadopodia | |
| | | | | | and on shed | |
| | | | | | vesicles. | |
| SERPH_HUMAN | Serpin H1 | SERPINH1 | Secreted, | LungCancers, | Endoplasmic | Detection, |
| | | | EPI, ENDO | BenignNodules | reticulum | Prediction |
| | | | | | lumen. | |
| SFPA2_HUMAN | Pulmonary | SFTPA2 | Secreted | LungCancers, | Secreted, | UniProt, |
| | surfactant- | | | BenignNodules | extracellular | Prediction |
| | associated | | | | space, | |
| | protein A2 | | | | extracellular | |
| | | | | | matrix. | |
| | | | | | Secreted, | |
| | | | | | extracellular | |
| | | | | | space, surface | |
| | | | | | film. | |
| SFTA1_HUMAN | Pulmonary | SFTPA1 | Secreted | LungCancers, | Secreted, | UniProt, |
| | surfactant- | | | BenignNodules, | extracellular | Prediction |
| | associated | | | Symptoms | space, | |
| | protein A1 | | | | extracellular | |
| | | | | | matrix. | |
| | | | | | Secreted, | |
| | | | | | extracellular | |
| | | | | | space, surface | |
| | | | | | film. | |
| SG3A2_HUMAN | Secretoglobin | SCGB3A2 | | LungCancers, | Secreted. | UniProt, |
| | family | | | BenignNodules | | Prediction |
| | 3A member 2 | | | | | |
| SGPL1_HUMAN | Sphingosine- | SGPL1 | ENDO | | Endoplasmic | UniProt, |
| | 1- | | | | reticulum | Prediction |
| | phosphate | | | | membrane; | |
| | lyase 1 | | | | Single-pass | |
| | | | | | type III | |
| | | | | | membrane | |
| | | | | | protein. | |
| SIAL_HUMAN | Bone | IBSP | | LungCancers | Secreted. | UniProt, |
| | sialoprotein 2 | | | | | Literature, |
| | | | | | | Prediction |
| SLPI_HUMAN | Antileukoproteinase | SLPI | | LungCancers, | Secreted. | UniProt, |
| | | | | BenignNodules | | Literature, |
| | | | | | | Detection, |
| | | | | | | Prediction |
| SMD3_HUMAN | Small | SNRPD3 | Secreted | BenignNodules | Nucleus. | Prediction |
| | nuclear | | | | | |
| | ribonucleo | | | | | |
| | protein SmD3 | | | | | |
| SMS_HUMAN | Somatostatin | SST | | LungCancers | Secreted. | UniProt, |
| | | | | | | Literature, |
| | | | | | | Prediction |
| SODM_HUMAN | Superoxide | SOD2 | Secreted | LungCancers, | Mitochondrion | Literature, |
| | dismutase | | | BenignNodules, | matrix. | Detection, |
| | [Mn], | | | Symptoms | | Prediction |
| | mitochondrial | | | | | |
| SORL_HUMAN | Sortilin- | SORL1 | EPI | LungCancers, | Membrane; | UniProt, |
| | related | | | Symptoms | Single-pass | Detection |
| | receptor | | | | type I | |
| | | | | | membrane | |
| | | | | | protein | |
| | | | | | (Potential). | |
| SPB3_HUMAN | Serpin B3 | SERPINB3 | | LungCancers, | Cytoplasm. | Literature, |
| | | | | BenignNodules | Note = Seems to | Detection |
| | | | | | also be secreted | |
| | | | | | in plasma by | |
| | | | | | cancerous cells | |
| | | | | | but at a low | |
| | | | | | level. | |
| SPB5_HUMAN | Serpin B5 | SERPINB5 | | LungCancers | Secreted, | UniProt, |
| | | | | | extracellular | Detection |
| | | | | | space. | |
| SPON2_HUMAN | Spondin-2 | SPON2 | | LungCancers, | Secreted, | UniProt, |
| | | | | BenignNodules | extracellular | Prediction |
| | | | | | space, | |
| | | | | | extracellular | |
| | | | | | matrix (By | |
| | | | | | similarity). | |
| SPRC_HUMAN | SPARC | SPARC | | LungCancers, | Secreted, | UniProt, |
| | | | | BenignNodules, | extracellular | Literature, |
| | | | | Symptoms | space, | Detection, |
| | | | | | extracellular | Prediction |
| | | | | | matrix, | |
| | | | | | basement | |
| | | | | | membrane. | |
| | | | | | Note = In or | |
| | | | | | around the | |
| | | | | | basement | |
| | | | | | membrane. | |
| SRC_HUMAN | Proto- | SRC | ENDO | LungCancers, | | Literature |
| | oncogene | | | BenignNodules, | | |
| | tyrosine- | | | Symptoms | | |
| | protein | | | | | |
| | kinase Src | | | | | |
| SSRD_HUMAN | Translocon- | SSR4 | Secreted, | | Endoplasmic | UniProt, |
| | associated | | ENDO | | reticulum | Prediction |
| | protein | | | | membrane; | |
| | subunit | | | | Single-pass | |
| | delta | | | | type I | |
| | | | | | membrane | |
| | | | | | protein. | |
| STAT1_HUMAN | Signal | STAT1 | EPI | LungCancers, | Cytoplasm. | Detection |
| | transducer | | | BenignNodules | Nucleus. | |
| | and | | | | Note = Translocated | |
| | activator of | | | | into the | |
| | transcription | | | | nucleus in | |
| | 1- | | | | response to | |
| | alpha/beta | | | | IFN-gamma- | |
| | | | | | induced | |
| | | | | | tyrosine | |
| | | | | | phosphorylation | |
| | | | | | and | |
| | | | | | dimerization. | |
| STAT3_HUMAN | Signal | STAT3 | ENDO | LungCancers, | Cytoplasm. | Prediction |
| | transducer | | | BenignNodules, | Nucleus. | |
| | and | | | Symptoms | Note = Shuttles | |
| | activator of | | | | between the | |
| | transcription 3 | | | | nucleus and the | |
| | | | | | cytoplasm. | |
| | | | | | Constitutive | |
| | | | | | nuclear | |
| | | | | | presence is | |
| | | | | | independent of | |
| | | | | | tyrosine | |
| | | | | | phosphorylation | |
| STC1_HUMAN | Stanniocalcin-1 | STC1 | | LungCancers, | Secreted. | UniProt, |
| | | | | Symptoms | | Prediction |
| STT3A_HUMAN | Dolichyl- | STT3A | EPI | Symptoms | Endoplasmic | Literature |
| | diphosphooligosaccharide-- | | | | reticulum | |
| | protein | | | | membrane; | |
| | glycosyltransferase | | | | Multi-pass | |
| | subunit | | | | membrane | |
| | STT3A | | | | protein. | |
| TAGL_HUMAN | Transgelin | TAGLN | EPI | LungCancers | Cytoplasm | Literature, |
| | | | | | (Probable). | Prediction |
| TARA_HUMAN | TRIO and | TRIOBP | ENDO | | Nucleus. | Detection, |
| | F-actin- | | | | Cytoplasm, | Prediction |
| | binding | | | | cytoskeleton. | |
| | protein | | | | Note = Localized | |
| | | | | | to F-actin in a | |
| | | | | | periodic pattern. | |
| TBA1B_HUMAN | Tubulin | TUBA1B | EPI | LungCancers | | Detection |
| | alpha-1B | | | | | |
| | chain | | | | | |
| TBB2A_HUMAN | Tubulin | TUBB2A | EPI | LungCancers, | | Detection, |
| | beta-2A | | | BenignNodules | | Prediction |
| | chain | | | | | |
| TBB3_HUMAN | Tubulin | TUBB3 | EPI | LungCancers, | | Detection |
| | beta-3 | | | BenignNodules | | |
| | chain | | | | | |
| TBB5_HUMAN | Tubulin | TUBB | EPI | LungCancers, | | Detection |
| | beta chain | | | BenignNodules | | |
| TCPA_HUMAN | T-complex | TCP1 | EPI | | Cytoplasm. | Prediction |
| | protein 1 | | | | | |
| | subunit | | | | | |
| | alpha | | | | | |
| TCPD_HUMAN | T-complex | CCT4 | EPI | | Cytoplasm. | Detection, |
| | protein 1 | | | | Melanosome. | Prediction |
| | subunit | | | | Note = Identified | |
| | delta | | | | by mass | |
| | | | | | spectrometry in | |
| | | | | | melanosome | |
| | | | | | fractions from | |
| | | | | | stage I to stage | |
| | | | | | IV. | |
| TCPQ_HUMAN | T-complex | CCT8 | Secreted, | | Cytoplasm. | Prediction |
| | protein 1 | | EPI | | | |
| | subunit | | | | | |
| | theta | | | | | |
| TCPZ_HUMAN | T-complex | CCT6A | Secreted, | | Cytoplasm. | Detection |
| | protein 1 | | EPI | | | |
| | subunit | | | | | |
| | zeta | | | | | |
| TDRD3_HUMAN | Tudor | TDRD3 | ENDO | | Cytoplasm. | Prediction |
| | domain- | | | | Nucleus. | |
| | containing | | | | Note = Predominantly | |
| | protein 3 | | | | cytoplasmic. | |
| | | | | | Associated with | |
| | | | | | actively | |
| | | | | | translating | |
| | | | | | polyribosomes | |
| | | | | | and with | |
| | | | | | mRNA stress | |
| | | | | | granules. | |
| TENA_HUMAN | Tenascin | TNC | ENDO | LungCancers, | Secreted, | UniProt, |
| | | | | BenignNodules, | extracellular | Literature, |
| | | | | Symptoms | space, | Detection |
| | | | | | extracellular | |
| | | | | | matrix. | |
| TENX_HUMAN | Tenascin-X | TNXB | ENDO | LungCancers, | Secreted, | UniProt, |
| | | | | Symptoms | extracellular | Detection, |
| | | | | | space, | Prediction |
| | | | | | extracellular | |
| | | | | | matrix. | |
| TERA_HUMAN | Transitional | VCP | EPI | LungCancers, | Cytoplasm, | Detection |
| | endoplasmic | | | BenignNodules | cytosol. | |
| | reticulum | | | | Nucleus. | |
| | ATPase | | | | Note = Present in | |
| | | | | | the neuronal | |
| | | | | | hyaline | |
| | | | | | inclusion bodies | |
| | | | | | specifically | |
| | | | | | found in motor | |
| | | | | | neurons from | |
| | | | | | amyotrophic | |
| | | | | | lateral sclerosis | |
| | | | | | patients. Present | |
| | | | | | in the Lewy | |
| | | | | | bodies | |
| | | | | | specifically | |
| | | | | | found in | |
| | | | | | neurons from | |
| | | | | | Parkinson | |
| | | | | | disease patients. | |
| TETN_HUMAN | Tetranectin | CLEC3B | | LungCancers | Secreted. | UniProt, |
| | | | | | | Literature, |
| | | | | | | Detection, |
| | | | | | | Prediction |
| TF_HUMAN | Tissue | F3 | | LungCancers, | Membrane; | UniProt, |
| | factor | | | BenignNodules, | Single-pass | Literature |
| | | | | Symptoms | type I | |
| | | | | | membrane | |
| | | | | | protein. | |
| TFR1_HUMAN | Transferrin | TFRC | Secreted, | LungCancers, | Cell membrane; | UniProt, |
| | receptor | | EPI, ENDO | BenignNodules, | Single-pass | Literature, |
| | protein 1 | | | Symptoms | type II | Detection |
| | | | | | membrane | |
| | | | | | protein. | |
| | | | | | Melanosome. | |
| | | | | | Note = Identified | |
| | | | | | by mass | |
| | | | | | spectrometry in | |
| | | | | | melanosome | |
| | | | | | fractions from | |
| | | | | | stage I to stage | |
| | | | | | IV.\|Transferrin | |
| | | | | | receptor protein | |
| | | | | | 1, serum form: | |
| | | | | | Secreted. | |
| TGFA_HUMAN | Protransforming | TGFA | | LungCancers, | Transforming | UniProt, |
| | growth | | | BenignNodules | growth factor | Literature |
| | factor alpha | | | | alpha: Secreted, | |
| | | | | | extracellular | |
| | | | | | space.\|Protransforming | |
| | | | | | growth | |
| | | | | | factor alpha: | |
| | | | | | Cell membrane; | |
| | | | | | Single-pass | |
| | | | | | type I | |
| | | | | | membrane | |
| | | | | | protein. | |
| THAS_HUMAN | Thromboxane-A | TBXAS1 | EPI, ENDO | LungCancers, | Membrane; | Prediction |
| | synthase | | | BenignNodules, | Multi-pass | |
| | | | | Symptoms | membrane | |
| | | | | | protein. | |
| THY1_HUMAN | Thy-1 | THY1 | EPI | Symptoms | Cell membrane; | Detection, |
| | membrane | | | | Lipid-anchor, | Prediction |
| | glycoprotein | | | | GPI-anchor (By | |
| | | | | | similarity). | |
| TIMP1_HUMAN | Metalloproteinase | TIMP1 | | LungCancers, | Secreted. | UniProt, |
| | inhibitor 1 | | | BenignNodules, | | Literature, |
| | | | | Symptoms | | Detection, |
| | | | | | | Prediction |
| TIMP3_HUMAN | Metalloproteinase | TIMP3 | | LungCancers, | Secreted, | UniProt, |
| | inhibitor 3 | | | BenignNodules | extracellular | Literature, |
| | | | | | space, | Prediction |
| | | | | | extracellular | |
| | | | | | matrix. | |
| TLL1_HUMAN | Tolloid- | TLL1 | ENDO | | Secreted | UniProt, |
| | like protein 1 | | | | (Probable). | Prediction |
| TNF12_HUMAN | Tumor | TNFSF12 | | LungCancers, | Cell membrane; | UniProt |
| | necrosis | | | BenignNodules | Single-pass | |
| | factor | | | | type II | |
| | ligand | | | | membrane | |
| | superfamily | | | | protein.\|Tumor | |
| | member | | | | necrosis factor | |
| | 12 | | | | ligand | |
| | | | | | superfamily | |
| | | | | | member 12, | |
| | | | | | secreted form: | |
| | | | | | Secreted. | |
| TNR6_HUMAN | Tumor | FAS | | LungCancers, | Isoform 1: Cell | UniProt, |
| | necrosis | | | BenignNodules, | membrane; | Literature, |
| | factor | | | Symptoms | Single-pass | Prediction |
| | receptor | | | | type I | |
| | superfamily | | | | membrane | |
| | member 6 | | | | protein.\|Isoform | |
| | | | | | 2: | |
| | | | | | Secreted.\|Isoform | |
| | | | | | 3: | |
| | | | | | Secreted.\|Isoform | |
| | | | | | 4: | |
| | | | | | Secreted.\|Isoform | |
| | | | | | 5: | |
| | | | | | Secreted.\|Isoform | |
| | | | | | 6: Secreted. | |
| TPIS_HUMAN | Triosephosphate | TPI1 | Secreted, | Symptoms | | Literature, |
| | isomerase | | EPI | | | Detection, |
| | | | | | | Prediction |
| TRFL_HUMAN | Lactotransferrin | LTF | Secreted, | LungCancers, | Secreted. | UniProt, |
| | | | EPI, ENDO | BenignNodules, | | Literature, |
| | | | | Symptoms | | Detection, |
| | | | | | | Prediction |
| TSP1_HUMAN | Thrombospondin-1 | THBS1 | | LungCancers, | | Literature, |
| | | | | BenignNodules, | | Detection, |
| | | | | Symptoms | | Prediction |
| TTHY_HUMAN | Transthyretin | TTR | | LungCancers, | Secreted. | UniProt, |
| | | | | BenignNodules | Cytoplasm. | Literature, |
| | | | | | | Detection, |
| | | | | | | Prediction |
| TYPH_HUMAN | Thymidine | TYMP | EPI | LungCancers, | | Literature, |
| | phosphorylase | | | BenignNodules, | | Detection, |
| | | | | Symptoms | | Prediction |
| UGGG1_HUMAN | UDP- | UGGT1 | Secreted, | | Endoplasmic | Detection, |
| | glucose:glycoprotein | | ENDO | | reticulum | Prediction |
| | glucosyltransferase 1 | | | | lumen. | |
| | | | | | Endoplasmic | |
| | | | | | reticulum-Golgi | |
| | | | | | intermediate | |
| | | | | | compartment. | |
| UGGG2_HUMAN | UDP- | UGGT2 | ENDO | | Endoplasmic | Prediction |
| | glucose:glycoprotein | | | | reticulum | |
| | glucosyltransferase 2 | | | | lumen. | |
| | | | | | Endoplasmic | |
| | | | | | reticulum-Golgi | |
| | | | | | intermediate | |
| | | | | | compartment. | |
| UGPA_HUMAN | UTP-- | UGP2 | EPI | Symptoms | Cytoplasm. | Detection |
| | glucose-1- | | | | | |
| | phosphate | | | | | |
| | uridylyltransferase | | | | | |
| UPAR_HUMAN | Urokinase | PLAUR | | LungCancers, | Isoform 1: Cell | UniProt, |
| | plasminogen | | | BenignNodules, | membrane; | Literature, |
| | activator | | | Symptoms | Lipid-anchor, | Prediction |
| | surface | | | | GPI- | |
| | receptor | | | | anchor.\|Isoform | |
| | | | | | 2: Secreted | |
| | | | | | (Probable). | |
| UTER_HUMAN | Uteroglobin | SCGB1A1 | | LungCancers, | Secreted. | UniProt, |
| | | | | BenignNodules, | | Literature, |
| | | | | Symptoms | | Detection, |
| | | | | | | Prediction |
| VA0D1_HUMAN | V-type | ATP6V0D1 | EPI | | | Prediction |
| | proton | | | | | |
| | ATPase | | | | | |
| | subunit d 1 | | | | | |
| VAV3_HUMAN | Guanine | VAV3 | ENDO | | | Prediction |
| | nucleotide | | | | | |
| | exchange | | | | | |
| | factor | | | | | |
| | VAV3 | | | | | |
| VEGFA_HUMAN | Vascular | VEGFA | | LungCancers, | Secreted. | UniProt, |
| | endothelial | | | BenignNodules, | Note = VEGF121 | Literature, |
| | growth | | | Symptoms | is acidic and | Prediction |
| | factor A | | | | freely secreted. | |
| | | | | | VEGF165 is | |
| | | | | | more basic, has | |
| | | | | | heparin-binding | |
| | | | | | properties and, | |
| | | | | | although a | |
| | | | | | signicant | |
| | | | | | proportion | |
| | | | | | remains cell- | |
| | | | | | associated, most | |
| | | | | | is freely | |
| | | | | | secreted. | |
| | | | | | VEGF189 is | |
| | | | | | very basic, it is | |
| | | | | | cell-associated | |
| | | | | | after secretion | |
| | | | | | and is bound | |
| | | | | | avidly by | |
| | | | | | heparin and the | |
| | | | | | extracellular | |
| | | | | | matrix, | |
| | | | | | although it may | |
| | | | | | be released as a | |
| | | | | | soluble form by | |
| | | | | | heparin, | |
| | | | | | heparinase or | |
| | | | | | plasmin. | |
| VEGFC_HUMAN | Vascular | VEGFC | | LungCancers, | Secreted. | UniProt, |
| | endothelial | | | BenignNodules | | Literature, |
| | growth | | | | | Prediction |
| | factor C | | | | | |
| VEGFD_HUMAN | Vascular | FIGF | | LungCancers | Secreted. | UniProt, |
| | endothelial | | | | | Literature, |
| | growth | | | | | Prediction |
| | factor D | | | | | |
| VGFR1_HUMAN | Vascular | FLT1 | | LungCancers, | Isoform Flt1: | UniProt, |
| | endothelial | | | BenignNodules, | Cell membrane; | Literature, |
| | growth | | | Symptoms | Single-pass | Detection, |
| | factor | | | | type I | Prediction |
| | receptor 1 | | | | membrane | |
| | | | | | protein.\|Isoform | |
| | | | | | sFlt1: Secreted. | |
| VTNC_HUMAN | Vitronectin | VTN | ENDO | Symptoms | Secreted, | UniProt, |
| | | | | | extracellular | Literature, |
| | | | | | space. | Detection, |
| | | | | | | Prediction |
| VWC2_HUMAN | Brorin | VWC2 | | LungCancers | Secreted, | UniProt, |
| | | | | | extracellular | Prediction |
| | | | | | space, | |
| | | | | | extracellular | |
| | | | | | matrix, | |
| | | | | | basement | |
| | | | | | membrane (By | |
| | | | | | similarity). | |
| WNT3A_HUMAN | Protein | WNT3A | | LungCancers, | Secreted, | UniProt, |
| | Wnt-3a | | | Symptoms | extracellular | Prediction |
| | | | | | space, | |
| | | | | | extracellular | |
| | | | | | matrix. | |
| WT1_HUMAN | Wilms | WT1 | | LungCancers, | Nucleus. | Literature, |
| | tumor | | | BenignNodules, | Cytoplasm (By | Prediction |
| | protein | | | Symptoms | similarity). | |
| | | | | | Note = Shuttles | |
| | | | | | between | |
| | | | | | nucleus and | |
| | | | | | cytoplasm (By | |
| | | | | | similarity).\|Isoform | |
| | | | | | 1: Nucleus | |
| | | | | | speckle.\|Isoform | |
| | | | | | 4: Nucleus, | |
| | | | | | nucleoplasm. | |
| ZA2G_HUMAN | Zinc-alpha- | AZGP1 | | LungCancers, | Secreted. | UniProt, |
| | 2- | | | Symptoms | | Literature, |
| | glycoprotein | | | | | Detection, |
| | | | | | | Prediction |
| ZG16B_HUMAN | Zymogen | ZG16B | | LungCancers | Secreted | UniProt, |
| | granule | | | | (Potential). | Prediction |
| | protein 16 | | | | | |
| | homolog B | | | | | |

### SRM Assay

[0078] SRM assays for 388 targeted proteins were developed based on synthetic peptides, using a protocol similar to those described in the literature (Lange, Picotti et al. 2008, Picotti, Rinner et al. 2010, Huttenhain, Soste et al. 2012). Up to five SRM suitable peptides per protein were identified from public sources such as the PeptideAtlas, Human Plasma Proteome Database or by proteotypic prediction tools (Mallick, Schirle et al. 2007) and synthesized. SRM triggered MS/MS spectra were collected on an ABSciex 5500 QTrap for both doubly and triply charged precursor ions. The obtained MS/MS spectra were assigned to individual peptides using MASCOT (cutoff score ≧15) (Perkins, Pappin et al. 1999). Up to four transitions per precursor ion were selected for optimization. The resulting corresponding optimal retention time, declustering potential and collision energy were assembled for all transitions. Optimal transitions were measured on a mixture of all synthetic peptides, a pooled sample of benign patients and a pooled sample of cancer patients. Transitions were analyzed in batches, each containing up to 1750 transitions. Both biological samples were immuno-depleted and digested by trypsin. All three samples were analyzed on an ABSciex 5500 QTrap coupled with a reversed-phase (RP) high-performance liquid chromatography (HPLC) system. The obtained SRM data were manually reviewed to select the two best peptides per protein and the two best transitions per peptide. Transitions having interference with other transitions were not selected. Ratios between intensities of the two best transitions of peptides in the synthetic peptide mixture were also used to assess the specificity of the transitions in the biological samples. The intensity ratio was considered as an important metric defining the SRM assays. The complete transition table is shown below in Table 2.

Lengthy table referenced here
US20130203096A1-20130808-T00001
Please refer to the end of the specification for access instructions.

### Exemplary Protein Detection

[0079] The following 164 proteins and their peptides were detected simultaneously in a large-scale experiment of 158 samples using the MS-LC-SRM-MS system described herein.

TABLE 3

| | | SEQ | | |
|---|---|---|---|---|
| | | ID | Protein | Peptide |
| Protein | Peptide | NO: | Detection | Detection |
| 1433E_HUMAN | EDLVYQAK | 6157 | 16 | 16 |
| 1433E_HUMAN | IISSIEQK | 6158 | 16 | 0 |
| 1433T_HUMAN | AVTEQGAELSNEER | 6159 | 127 | 0 |
| 1433T_HUMAN | TAFDEAIAELDTLNEDSYK | 6160 | 127 | 127 |
| 1433Z_HUMAN | FLIPNASQAESK | 6161 | 157 | 157 |
| 1433Z_HUMAN | SVTEQGAELSNEER | 6162 | 157 | 0 |
| 6PGD_HUMAN | AGQAVDDFIEK | 6163 | 90 | 0 |
| 6PGD_HUMAN | LVPLLDTGDIIIDGGNSEYR | 6164 | 90 | 90 |
| A1AG1_HUMAN | WFYIASAFR | 6165 | 157 | 0 |
| A1AG1_HUMAN | YVGGQEHFAHLLILR | 6166 | 157 | 157 |
| ABCD1_HUMAN | DAGIALLSITHRPSLWK | 6167 | 9 | 0 |
| ABCD1_HUMAN | GLQAPAGEPTQEASGVAAAK | 6168 | 9 | 0 |
| ABCD1_HUMAN | NLLTAAADAIER | 6169 | 9 | 9 |
| ADML_HUMAN | LAHQIYQFTDK | 6170 | 27 | 27 |
| ADML_HUMAN | SPEDSSPDAAR | 6171 | 27 | 0 |
| AIFM1_HUMAN | ELWFSDDPNVTK | 6172 | 158 | 158 |
| AIFM1_HUMAN | GVIFYLR | 6173 | 158 | 0 |
| ALDOA_HUMAN | ADDGRPFPQVIK | 6174 | 158 | 141 |
| ALDOA_HUMAN | ALQASALK | 6175 | 158 | 17 |
| AMPN_HUMAN | ALEQALEK | 6176 | 158 | 158 |
| AMPN_HUMAN | DHSAIPVINR | 6177 | 158 | 0 |
| APOA1_HUMAN | AKPALEDLR | 6178 | 158 | 158 |
| APOA1_HUMAN | ATEHLSTLSEK | 6179 | 158 | 0 |
| APOE_HUMAN | AATVGSLAGQPLQER | 6180 | 158 | 158 |
| APOE_HUMAN | LGPLVEQGR | 6181 | 158 | 0 |
| BGH3_HUMAN | LTLLAPLNSVFK | 6182 | 158 | 0 |
| BGH3_HUMAN | SPYQLVLQHSR | 6183 | 158 | 158 |
| BST1_HUMAN | GEGTSAHLR | 6184 | 157 | 0 |
| BST1_HUMAN | GFFADYEIPNLQK | 6185 | 157 | 157 |
| C163A_HUMAN | INPASLDK | 6186 | 158 | 11 |
| C163A_HUMAN | LEVFYNGAWGTVGK | 6187 | 158 | 49 |
| C163A_HUMAN | TSYQVYSK | 6188 | 158 | 98 |
| CALU_HUMAN | EQFVEFR | 6189 | 120 | 120 |
| CALU_HUMAN | TFDQLTPEESK | 6190 | 120 | 0 |
| CATB_HUMAN | LPASFDAR | 6191 | 62 | 62 |
| CATB_HUMAN | TDQYWEK | 6192 | 62 | 0 |
| CATG_HUMAN | NVNPVALPR | 6193 | 14 | 0 |
| CATG_HUMAN | SSGVPPEVFTR | 6194 | 14 | 14 |
| CBPB2_HUMAN | DTGTYGFLLPER | 6195 | 158 | 158 |
| CBPB2_HUMAN | EAFAAVSK | 6196 | 158 | 0 |
| CD14_HUMAN | ATVNPSAPR | 6197 | 158 | 0 |
| CD14_HUMAN | SWLAELQQWLKPGLK | 6198 | 158 | 158 |
| CD44_HUMAN | FAGVFHVEK | 6199 | 158 | 158 |
| CD44_HUMAN | YGFIEGHVVIPR | 6200 | 158 | 0 |
| CD59_HUMAN | AGLQVYNK | 6201 | 156 | 156 |
| CD59_HUMAN | TVLLLVTPFLAAAWSLHP | 6202 | 156 | 0 |
| CDCP1_HUMAN | EEGVFTVTPDTK | 6203 | 157 | 0 |
| CDCP1_HUMAN | LSLVLVPAQK | 6204 | 157 | 157 |
| CEAM8_HUMAN | LFIPNITTK | 6205 | 79 | 79 |
| CEAM8_HUMAN | TLTLLSVTR | 6206 | 79 | 0 |
| CERU_HUMAN | GAYPLSIEPIGVR | 6207 | 158 | 0 |
| CERU_HUMAN | GPEEEHLGILGPVIWAEVGDTIR | 6208 | 158 | 158 |
| CERU_HUMAN | NNEGTYYSPNYNPQSR | 6209 | 158 | 0 |
| CH10_HUMAN | GGEIQPVSVK | 6210 | 158 | 0 |
| CH10_HUMAN | VLLPEYGGTK | 6211 | 158 | 158 |
| CLIC1_HUMAN | FSAYIK | 6212 | 137 | 8 |
| CLIC1_HUMAN | LAALNPESNTAGLDIFAK | 6213 | 137 | 129 |
| CLIC1_HUMAN | NSNPALNDNLEK | 6214 | 137 | 0 |
| CLUS_HUMAN | ASSIIDELFQDR | 6215 | 158 | 0 |
| CLUS_HUMAN | EIQNAVNGVK | 6216 | 158 | 158 |
| CNTN1_HUMAN | AHSDGGDGVVSQVK | 6217 | 158 | 157 |
| CNTN1_HUMAN | DGEYVVEVR | 6218 | 158 | 1 |
| CO6A3_HUMAN | IGDLHPQIVNLLK | 6219 | 158 | 0 |
| CO6A3_HUMAN | VAVVQYSDR | 6220 | 158 | 158 |
| CO6A3_HUMAN | WYYDPNTK | 6221 | 158 | 0 |
| COF1_HUMAN | EILVGDVGQTVDDPYATFVK | 6222 | 127 | 0 |
| COF1_HUMAN | LGGSAVISLEGKPL | 6223 | 127 | 0 |
| COF1_HUMAN | YALYDATYETK | 6224 | 127 | 127 |
| COIA1_HUMAN | AVGLAGTFR | 6225 | 158 | 37 |
| COIA1_HUMAN | TEAPSATGQASSLLGGR | 6226 | 158 | 121 |
| CRP_HUMAN | APLTKPLK | 6227 | 153 | 21 |
| CRP_HUMAN | ESDTSYVSLK | 6228 | 153 | 132 |
| CRP_HUMAN | YEVQGEVFTKPQLWP | 6229 | 153 | 0 |
| CSF1_HUMAN | FNSVPLTDTGHER | 6230 | 134 | 113 |
| CSF1_HUMAN | ISSLRPQGLSNPSTLSAQPQLSR | 6231 | 134 | 21 |
| CYTB_HUMAN | SQLEEK | 6232 | 100 | 0 |
| CYTB_HUMAN | SQVVAGTNYFIK | 6233 | 100 | 100 |
| DESP_HUMAN | YGDGIQLTR | 6234 | 131 | 131 |
| DMKN_HUMAN | QVPGFGVADALGNR | 6235 | 128 | 0 |
| DMKN_HUMAN | VSEALGQGTR | 6236 | 128 | 128 |
| DSG2_HUMAN | GQIIGNFQAFDEDTGLPAHAR | 6237 | 158 | 1 |
| DSG2_HUMAN | ILDVNDNIPVVENK | 6238 | 158 | 157 |
| EF1A1_HUMAN | IGGIGTVPVGR | 6239 | 158 | 158 |
| EF1A1_HUMAN | QTVAVGVIK | 6240 | 158 | 0 |
| EF2_HUMAN | FSVSPVVR | 6241 | 125 | 125 |
| EF2_HUMAN | GVQYLNEIK | 6242 | 125 | 0 |
| ENOA_HUMAN | AVEHINK | 6243 | 156 | 0 |
| ENOA_HUMAN | YISPDQLADLYK | 6244 | 156 | 156 |
| ENOA_HUMAN | YNQLLR | 6245 | 156 | 0 |
| ENPL_HUMAN | SGTSEFLNK | 6246 | 158 | 1 |
| ENPL_HUMAN | SGYLLPDTK | 6247 | 158 | 157 |
| EPHB6_HUMAN | RPHFDQLVAAFDK | 6248 | 157 | 0 |
| EPHB6_HUMAN | WAAPEVIAHGK | 6249 | 157 | 157 |
| ERBB3_HUMAN | GESIEPLDPSEK | 6250 | 105 | 0 |
| ERBB3_HUMAN | LAEVPDLLEK | 6251 | 105 | 105 |
| EREG_HUMAN | VAQVSITK | 6252 | 115 | 115 |
| EREG_HUMAN | VTSGDPELPQV | 6253 | 115 | 0 |
| ERO1A_HUMAN | AVLQWTK | 6254 | 121 | 0 |
| ERO1A_HUMAN | LLESDYFR | 6255 | 121 | 0 |
| ERO1A_HUMAN | NLLQNIH | 6256 | 121 | 0 |
| ERO1A_HUMAN | VLPFFERPDFQLFTGNK | 6257 | 121 | 121 |
| F10A1_HUMAN | AIDLFTDAIK | 6258 | 35 | 0 |
| F10A1_HUMAN | LQKPNAAIR | 6259 | 35 | 35 |
| FAM3C_HUMAN | GINVALANGK | 6260 | 97 | 88 |
| FAM3C_HUMAN | SALDTAAR | 6261 | 97 | 9 |
| FAM3C_HUMAN | TGEVLDTK | 6262 | 97 | 0 |
| FCGR1_HUMAN | HLEEELK | 6263 | 39 | 0 |
| FCGR1_HUMAN | VFTEGEPLALR | 6264 | 39 | 39 |
| FIBA_HUMAN | GGSTSYGTGSETESPR | 6265 | 147 | 108 |
| FIBA_HUMAN | NSLFEYQK | 6266 | 147 | 39 |
| FINC_HUMAN | SYTITGLQPGTDYK | 6267 | 154 | 135 |
| FINC_HUMAN | VPGTSTSATLTGLTR | 6268 | 154 | 19 |
| FKB11_HUMAN | ANYWLK | 6269 | 23 | 0 |
| FKB11_HUMAN | DPLVIELGQK | 6270 | 23 | 23 |
| FOLH1_HUMAN | GVILYSDPADYFAPGVK | 6271 | 138 | 0 |
| FOLH1_HUMAN | LGSGNDFEVFFQR | 6272 | 138 | 138 |
| FRIL_HUMAN | DDVALEGVSHFFR | 6273 | 151 | 0 |
| FRIL_HUMAN | LGGPEAGLGEYLFER | 6274 | 151 | 151 |
| G3P_HUMAN | GALQNIIPASTGAAK | 6275 | 150 | 149 |
| G3P_HUMAN | LISWYDNEFGYSNR | 6276 | 150 | 1 |
| G6PD_HUMAN | DGLLPENTFIVGYAR | 6277 | 43 | 43 |
| G6PD_HUMAN | GGYFDEFGIIR | 6278 | 43 | 0 |
| G6PI_HUMAN | AVLHVALR | 6279 | 39 | 6 |
| G6PI_HUMAN | TLAQLNPESSLFIIASK | 6280 | 39 | 33 |
| GDIR2_HUMAN | DIVSGLK | 6281 | 158 | 158 |
| GDIR2_HUMAN | LNYKPPPQK | 6282 | 158 | 0 |
| GELS_HUMAN | AQPVQVAEGSEPDGFWEALGGK | 6283 | 158 | 0 |
| GELS_HUMAN | TASDFITK | 6284 | 158 | 158 |
| GGH_HUMAN | NLDGISHAPNAVK | 6285 | 158 | 158 |
| GGH_HUMAN | YYIAASYVK | 6286 | 158 | 0 |
| GRP78_HUMAN | TWNDPSVQQDIK | 6287 | 158 | 90 |
| GRP78_HUMAN | VYEGERPLTK | 6288 | 158 | 68 |
| GSLG1_HUMAN | IIIQESALDYR | 6289 | 158 | 158 |
| GSLG1_HUMAN | LDPALQDK | 6290 | 158 | 0 |
| GSLG1_HUMAN | LIAQDYK | 6291 | 158 | 0 |
| GSLG1_HUMAN | NDINILK | 6292 | 158 | 0 |
| GSTP1_HUMAN | ALPGQLKPFETLLSQNQGGK | 6293 | 123 | 123 |
| GSTP1_HUMAN | YISLIYTNYEAGK | 6294 | 123 | 0 |
| HPSE_HUMAN | LPYPFSNK | 6295 | 49 | 0 |
| HPSE_HUMAN | SVQLNGLTLK | 6296 | 49 | 49 |
| HPT_HUMAN | VGYVSGWGR | 6297 | 158 | 0 |
| HPT_HUMAN | VTSIQDWVQK | 6298 | 158 | 158 |
| HS90A_HUMAN | SLTNDWEDHLAVK | 6299 | 32 | 32 |
| HS90B_HUMAN | ADHGEPIGR | 6300 | 121 | 0 |
| HS90B_HUMAN | IDIIPNPQER | 6301 | 121 | 121 |
| HS90B_HUMAN | NPDDITQEEYGEFYK | 6302 | 121 | 0 |
| HSPB1_HUMAN | DGVVEITGK | 6303 | 30 | 0 |
| HSPB1_HUMAN | GPSWDPFR | 6304 | 30 | 30 |
| HTRA1_HUMAN | LHRPPVIVLQR | 6305 | 40 | 40 |
| HTRA1_HUMAN | LPVLLLGR | 6306 | 40 | 0 |
| HTRA1_HUMAN | VTAGISFAIPSDK | 6307 | 40 | 0 |
| HXK1_HUMAN | FLLSESGSGK | 6308 | 117 | 17 |
| HXK1_HUMAN | LVDEYSLNAGK | 6309 | 117 | 47 |
| HXK1_HUMAN | SANLVAATLGAILNR | 6310 | 117 | 53 |
| HYOU1_HUMAN | FPEHELTFDPQR | 6311 | 156 | 0 |
| HYOU1_HUMAN | LPATEKPVLLSK | 6312 | 156 | 156 |
| IBP2_HUMAN | AEVLFR | 6313 | 158 | 0 |
| IBP2_HUMAN | ELAVFR | 6314 | 158 | 158 |
| IBP2_HUMAN | LIQGAPTIR | 6315 | 158 | 0 |
| IBP3_HUMAN | FHPLHSK | 6316 | 158 | 0 |
| IBP3_HUMAN | FLNVLSPR | 6317 | 158 | 0 |
| IBP3_HUMAN | YGQPLPGYTTK | 6318 | 158 | 158 |
| ICAM1_HUMAN | ASVSVTAEDEGTQR | 6319 | 114 | 0 |
| ICAM1_HUMAN | VELAPLPSWQPVGK | 6320 | 114 | 114 |
| ICAM3_HUMAN | IALETSLSK | 6321 | 158 | 0 |
| ICAM3_HUMAN | TFVLPVTPPR | 6322 | 158 | 158 |
| IF4A1_HUMAN | GYDVIAQAQSGTGK | 6323 | 58 | 0 |
| IF4A1_HUMAN | VLITTDLLAR | 6324 | 58 | 58 |
| IGF1_HUMAN | EGTEASLQIR | 6325 | 40 | 0 |
| IGF1_HUMAN | ISSLPTQLFK | 6326 | 40 | 40 |
| IL18_HUMAN | SDIIFFQR | 6327 | 45 | 45 |
| IL18_HUMAN | SVPGHDNK | 6328 | 45 | 0 |
| ILEU_HUMAN | EATTNAPFR | 6329 | 88 | 13 |
| ILEU_HUMAN | TYNFLPEFLVSTQK | 6330 | 88 | 75 |
| ILK_HUMAN | HSGIDFK | 6331 | 90 | 15 |
| ILK_HUMAN | QLNFLTK | 6332 | 90 | 75 |
| ILK_HUMAN | WQGNDIVVK | 6333 | 90 | 0 |
| INHBA_HUMAN | AEVWLFLK | 6334 | 32 | 0 |
| INHBA_HUMAN | EGSDLSVVER | 6335 | 32 | 32 |
| ISLR_HUMAN | ALPGTPVASSQPR | 6336 | 158 | 0 |
| ISLR_HUMAN | EVPLLQSLWLAHNEIR | 6337 | 158 | 0 |
| ISLR_HUMAN | LPGLPEGAFR | 6338 | 158 | 158 |
| ITA5_HUMAN | SLQWFGATVR | 6339 | 114 | 114 |
| ITA5_HUMAN | SSASSGPQILK | 6340 | 114 | 0 |
| K1C18_HUMAN | LASYLDR | 6341 | 72 | 0 |
| K1C18_HUMAN | LQLETEIEALK | 6342 | 72 | 72 |
| K1C18_HUMAN | VVSETNDTK | 6343 | 72 | 0 |
| K1C19_HUMAN | FGAQLAHIQALISGIEAQLGDVR | 6344 | 158 | 158 |
| K1C19_HUMAN | FGPGVAFR | 6345 | 158 | 0 |
| KIT_HUMAN | QATLTISSAR | 6346 | 158 | 158 |
| KIT_HUMAN | YVSELHLTR | 6347 | 158 | 0 |
| KLK14_HUMAN | VLGSGTWPSAPK | 6348 | 27 | 27 |
| KLK14_HUMAN | VSGWGTISSPIAR | 6349 | 27 | 0 |
| KPYM_HUMAN | APIIAVTR | 6350 | 158 | 13 |
| KPYM_HUMAN | LDIDSPPITAR | 6351 | 158 | 145 |
| LAMB2_HUMAN | IQGTLQPHAR | 6352 | 69 | 0 |
| LAMB2_HUMAN | SLADVDAILAR | 6353 | 69 | 31 |
| LAMB2_HUMAN | VLELSIPASAEQIQHLAGAIAER | 6354 | 69 | 38 |
| LDHA_HUMAN | FIIPNVVK | 6355 | 157 | 0 |
| LDHA_HUMAN | LVIITAGAR | 6356 | 157 | 157 |
| LDHB_HUMAN | FIIPQIVK | 6357 | 158 | 157 |
| LDHB_HUMAN | GLTSVINQK | 6358 | 158 | 1 |
| LEG1_HUMAN | GEVAPDAK | 6359 | 146 | 0 |
| LEG1_HUMAN | LPDGYEFK | 6360 | 146 | 0 |
| LEG1_HUMAN | SFVLNLGK | 6361 | 146 | 146 |
| LG3BP_HUMAN | ASHEEVEGLVEK | 6362 | 158 | 158 |
| LG3BP_HUMAN | VEIFYR | 6363 | 158 | 0 |
| LG3BP_HUMAN | YSSDYFQAPSDYR | 6364 | 158 | 0 |
| LRP1_HUMAN | TVLWPNGLSLDIPAGR | 6365 | 158 | 158 |
| LRP1_HUMAN | VFFTDYGQIPK | 6366 | 158 | 0 |
| LUM_HUMAN | NIPTVNENLENYYLEVNQLEK | 6367 | 158 | 158 |
| LUM_HUMAN | SLEDLQLTHNK | 6368 | 158 | 0 |
| LYOX_HUMAN | HWFQAGYSTSR | 6369 | 121 | 0 |
| LYOX_HUMAN | TPILLIR | 6370 | 121 | 121 |
| MASP1_HUMAN | APGELEHGLITFSTR | 6371 | 158 | 151 |
| MASP1_HUMAN | TGVITSPDFPNPYPK | 6372 | 158 | 7 |
| MDHC_HUMAN | LGVTANDVK | 6373 | 130 | 130 |
| MDHC_HUMAN | VLVTGAAGQIAYSLLYSIGNGSVFGK | 6374 | 130 | 0 |
| MDHM_HUMAN | VDFPQDQLTALTGR | 6375 | 158 | 158 |
| MDHM_HUMAN | VSSFEEK | 6376 | 158 | 0 |
| MMP12_HUMAN | FLLILLLQATASGALPLNSSTSLEK | 6377 | 158 | 158 |
| MMP12_HUMAN | GIQSLYGDPK | 6378 | 158 | 0 |
| MMP12_HUMAN | IDAVFYSK | 6379 | 158 | 0 |
| MMP2_HUMAN | AFQVWSDVTPLR | 6380 | 153 | 152 |
| MMP2_HUMAN | IIGYTPDLDPETVDDAFAR | 6381 | 153 | 1 |
| MMP7_HUMAN | LSQDDIK | 6382 | 102 | 102 |
| MMP7_HUMAN | NANSLEAK | 6383 | 102 | 0 |
| MMP9_HUMAN | AFALWSAVTPLTFTR | 6384 | 158 | 50 |
| MMP9_HUMAN | FQTFEGDLK | 6385 | 158 | 108 |
| MMP9_HUMAN | SLGPALLLLQK | 6386 | 158 | 0 |
| MPRI_HUMAN | GHQAFDVGQPR | 6387 | 158 | 23 |
| MPRI_HUMAN | TYHSVGDSVLR | 6388 | 158 | 4 |
| MPRI_HUMAN | VPIDGPPIDIGR | 6389 | 158 | 131 |
| NCF4_HUMAN | AEALFDFTGNSK | 6390 | 138 | 43 |
| NCF4_HUMAN | DAEGDLVR | 6391 | 138 | 0 |
| NCF4_HUMAN | DIAVEEDLSSTPLLK | 6392 | 138 | 0 |
| NCF4_HUMAN | GATGIFPLSFVK | 6393 | 138 | 95 |
| NDKB_HUMAN | DRPFFPGLVK | 6394 | 24 | 0 |
| NDKB_HUMAN | NIIHGSDSVK | 6395 | 24 | 24 |
| NRP1_HUMAN | FVSDYETHGAGFSIR | 6396 | 158 | 0 |
| NRP1_HUMAN | FVTAVGTQGAISK | 6397 | 158 | 158 |
| NRP1_HUMAN | SFEGNNNYDTPELR | 6398 | 158 | 0 |
| OSTP_HUMAN | AIPVAQDLNAPSDWDSR | 6399 | 108 | 108 |
| OSTP_HUMAN | DSYETSQLDDQSAETHSHK | 6400 | 108 | 0 |
| OSTP_HUMAN | YPDAVATWLNPDPSQK | 6401 | 108 | 0 |
| PCBP2_HUMAN | IANPVEGSTDR | 6402 | 52 | 0 |
| PCBP2_HUMAN | IITLAGPTNAIFK | 6403 | 52 | 52 |
| PCYOX_HUMAN | IAIIGAGIGGTSAAYYLR | 6404 | 37 | 0 |
| PCYOX_HUMAN | IFSQETLTK | 6405 | 37 | 37 |
| PCYOX_HUMAN | TLLETLQK | 6406 | 37 | 0 |
| PDGFB_HUMAN | SFDDLQR | 6407 | 111 | 99 |
| PDGFB_HUMAN | SHSGGELESLAR | 6408 | 111 | 12 |
| PDIA3_HUMAN | ELSDFISYLQR | 6409 | 129 | 129 |
| PDIA3_HUMAN | SEPIPESNDGPVK | 6410 | 129 | 0 |
| PDIA4_HUMAN | FDVSGYPTIK | 6411 | 81 | 81 |
| PDIA4_HUMAN | FHHTFSTEIAK | 6412 | 81 | 0 |
| PECA1_HUMAN | SELVTVTESFSTPK | 6413 | 77 | 0 |
| PECA1_HUMAN | STESYFIPEVR | 6414 | 77 | 77 |
| PEDF_HUMAN | LQSLFDSPDFSK | 6415 | 158 | 0 |
| PEDF_HUMAN | TVQAVLTVPK | 6416 | 158 | 158 |
| PGAM1_HUMAN | HGESAWNLENR | 6417 | 14 | 14 |
| PLIN2_HUMAN | DAVTTTVTGAK | 6418 | 138 | 0 |
| PLIN2_HUMAN | EVSDSLLTSSK | 6419 | 138 | 138 |
| PLSL_HUMAN | IGNFSTDIK | 6420 | 158 | 0 |
| PLSL_HUMAN | ISFDEFIK | 6421 | 158 | 158 |
| PLXB3_HUMAN | ELPVPIYVTQGEAQR | 6422 | 77 | 0 |
| PLXB3_HUMAN | GPVDAVTGK | 6423 | 77 | 77 |
| PLXC1_HUMAN | FWVNILK | 6424 | 158 | 0 |
| PLXC1_HUMAN | LNTIGHYEISNGSTIK | 6425 | 158 | 158 |
| POSTN_HUMAN | GFEPGVTNILK | 6426 | 158 | 158 |
| POSTN_HUMAN | IIDGVPVEITEK | 6427 | 158 | 0 |
| POSTN_HUMAN | IIHGNQIATNGVVHVIDR | 6428 | 158 | 0 |
| PPIB_HUMAN | VIFGLFGK | 6429 | 158 | 0 |
| PPIB_HUMAN | VYFDLR | 6430 | 158 | 158 |
| PRDX1_HUMAN | IGHPAPNFK | 6431 | 158 | 116 |
| PRDX1_HUMAN | QITVNDLPVGR | 6432 | 158 | 42 |
| PROF1_HUMAN | STGGAPTFNVTVTK | 6433 | 158 | 157 |
| PROF1_HUMAN | TFVNITPAEVGVLVGK | 6434 | 158 | 1 |
| PRS6A_HUMAN | VDILDPALLR | 6435 | 13 | 13 |
| PTGIS_HUMAN | DPEIYTDPEVFK | 6436 | 158 | 0 |
| PTGIS_HUMAN | LLLFPFLSPQR | 6437 | 158 | 158 |
| PTPA_HUMAN | FGSLLPIHPVTSG | 6438 | 103 | 103 |
| PTPA_HUMAN | TGPFAEHSNQLWNISAVPSWSK | 6439 | 103 | 0 |
| PTPA_HUMAN | VDDQIAIVFK | 6440 | 103 | 0 |
| PTPA_HUMAN | WIDETPPVDQPSR | 6441 | 103 | 0 |
| PTPRJ_HUMAN | AVSISPTNVILTWK | 6442 | 158 | 0 |
| PTPRJ_HUMAN | VITEPIPVSDLR | 6443 | 158 | 158 |
| PVR_HUMAN | SVDIWLR | 6444 | 158 | 158 |
| PVR_HUMAN | VLAKPQNTAEVQK | 6445 | 158 | 0 |
| RAB32_HUMAN | VHLPNGSPIPAVLLANK | 6446 | 22 | 0 |
| RAB32_HUMAN | VLVIGELGVGK | 6447 | 22 | 22 |
| RAN_HUMAN | FNVWDTAGQEK | 6448 | 116 | 2 |
| RAN_HUMAN | LVLVGDGGTGK | 6449 | 116 | 114 |
| RAN_HUMAN | NVPNWHR | 6450 | 116 | 0 |
| RAP2B_HUMAN | EVSYGEGK | 6451 | 145 | 0 |
| RAP2B_HUMAN | VDLEGER | 6452 | 145 | 145 |
| S10A1_HUMAN | DVDAVDK | 6453 | 128 | 128 |
| S10A1_HUMAN | ELLQTELSGFLDAQK | 6454 | 128 | 0 |
| S10A6_HUMAN | ELTIGSK | 6455 | 154 | 154 |
| S10A6_HUMAN | LQDAEIAR | 6456 | 154 | 0 |
| SAA_HUMAN | EANYIGSDK | 6457 | 143 | 0 |
| SAA_HUMAN | SFFSFLGEAFDGAR | 6458 | 143 | 143 |
| SCF_HUMAN | LFTPEEFFR | 6459 | 143 | 143 |
| SCF_HUMAN | LVANLPK | 6460 | 143 | 0 |
| SEM3G_HUMAN | DYPDEVLQFAR | 6461 | 155 | 0 |
| SEM3G_HUMAN | LFLGGLDALYSLR | 6462 | 155 | 155 |
| SIAL_HUMAN | AYEDEYSYFK | 6463 | 19 | 19 |
| SIAL_HUMAN | TTSPPFGK | 6464 | 19 | 0 |
| SODM_HUMAN | GDVTAQIALQPALK | 6465 | 154 | 151 |
| SODM_HUMAN | NVRPDYLK | 6466 | 154 | 3 |
| SPON2_HUMAN | WSQTAFPK | 6467 | 63 | 0 |
| SPON2_HUMAN | YSITFTGK | 6468 | 63 | 63 |
| STAT1_HUMAN | TELISVSEVHPSR | 6469 | 38 | 29 |
| STAT1_HUMAN | YTYEHDPITK | 6470 | 38 | 9 |
| TBA1B_HUMAN | AVFVDLEPTVIDEVR | 6471 | 119 | 119 |
| TSAIB_HUMAN | EIIDLVLDR | 6472 | 119 | 0 |
| TBB3_HUMAN | ISVYYNEASSHK | 6473 | 158 | 158 |
| TBB3_HUMAN | YLTVATVFR | 6474 | 158 | 0 |
| TCPA_HUMAN | IHPTSVISGYR | 6475 | 158 | 4 |
| TCPA_HUMAN | SSLGPVGLDK | 6476 | 158 | 154 |
| TCPQ_HUMAN | DIDEVSSLLR | 6477 | 48 | 0 |
| TCPQ_HUMAN | NVGLDIEAEVPAVK | 6478 | 48 | 48 |
| TCPZ_HUMAN | GIDPFSLDALSK | 6479 | 6 | 6 |
| TCPZ_HUMAN | GLVLDHGAR | 6480 | 6 | 0 |
| TENA_HUMAN | GLEPGQEYNVLLTAEK | 6481 | 140 | 140 |
| TENA_HUMAN | TVSGNTVEYALTDLEPATEYTLR | 6482 | 140 | 0 |
| TENX_HUMAN | DAQGQPQAVPVSGDLR | 6483 | 158 | 158 |
| TENX_HUMAN | YEVTVVSVR | 6484 | 158 | 0 |
| TERA_HUMAN | GILLYGPPGTGK | 6485 | 106 | 94 |
| TERA_HUMAN | LDQLIYIPLPDEK | 6486 | 106 | 12 |
| TETN_HUMAN | GGTLSTPQTGSENDALYEYLR | 6487 | 158 | 118 |
| TETN_HUMAN | LDTLAQEVALLK | 6488 | 158 | 40 |
| TFR1_HUMAN | LTVSNVLK | 6489 | 157 | 0 |
| TFR1_HUMAN | SSGLPNIPVQTISR | 6490 | 157 | 157 |
| TIMP1_HUMAN | GFQALGDAADIR | 6491 | 151 | 151 |
| TIMP1_HUMAN | SEEFLIAGK | 6492 | 151 | 0 |
| TNF12_HUMAN | AAPFLTYFGLFQVH | 6493 | 156 | 156 |
| TNF12_HUMAN | INSSSPLR | 6494 | 156 | 0 |
| TPIS_HUMAN | VVFEQTK | 6495 | 157 | 157 |
| TPIS_HUMAN | VVLAYEPVWAIGTGK | 6496 | 157 | 0 |
| TRFL_HUMAN | FQLFGSPSGQK | 6497 | 48 | 22 |
| TRFL_HUMAN | LRPVAAEVYGTER | 6498 | 48 | 4 |
| TRFL_HUMAN | VPSHAVVAR | 6499 | 48 | 5 |
| TRFL_HUMAN | YYGYTGAFR | 6500 | 48 | 17 |
| TSP1_HUMAN | GFLLLASLR | 6501 | 158 | 6 |
| TSP1_HUMAN | GTSQNDPNWVVR | 6502 | 158 | 152 |
| TTHY_HUMAN | TSESGELHGLTTEEEFVEGIYK | 6503 | 27 | 27 |
| TTHY_HUMAN | VEIDTK | 6504 | 27 | 0 |
| TYPH_HUMAN | ALQEALVLSDR | 6505 | 59 | 0 |
| TYPH_HUMAN | TLVGVGASLGLR | 6506 | 59 | 59 |
| UGGG1_HUMAN | DLSQNFPTK | 6507 | 58 | 58 |
| UGGG1_HUMAN | FTILDSQGK | 6508 | 58 | 0 |
| UGPA_HUMAN | LVEIAQVPK | 6509 | 97 | 97 |
| UGPA_HUMAN | NENTFLDLTVQQIEHLNK | 6510 | 97 | 0 |
| VAOD1_HUMAN | LLFEGAGSNPGDK | 6511 | 13 | 13 |
| VAOD1_HUMAN | NVADYYPEYK | 6512 | 13 | 0 |
| VEGFC_HUMAN | DLEEQLR | 6513 | 21 | 21 |
| VEGFC_HUMAN | EAPAAAAAFESGLDLSDAEPDAGEATAYAS | 6514 | 21 | 0 |
| | K | | | |
| VEGFC_HUMAN | FAAAHYNTEILK | 6515 | 21 | 0 |
| VEGFC_HUMAN | NQPLNPGK | 6516 | 21 | 0 |
| VTNC_HUMAN | AVRPGYPK | 6517 | 145 | 0 |
| VTNC_HUMAN | DVWGIEGPIDAAFTR | 6518 | 145 | 145 |
| ZA2G_HUMAN | EIPAWVPFDPAAQITK | 6519 | 158 | 158 |
| ZA2G_HUMAN | WEAEPVYVQR | 6520 | 158 | 0 |

### Exemplary Biomarker Protein

[0080] The following 36 proteins were identified as biomarker candidates in a large-scale experiment of 72 lung cancer samples and 71 benign lung nodule samples using the MS-LC-SRM-MS system described herein.

TABLE 4

| | | | | | | | | Coefficient | Coefficient | | |
|---|---|---|---|---|---|---|---|---|---|---|---|
| | | | | | | | | (Discovery) | (Final) | | Predicted |
| | Protein | Official Gene | Cooperative | Partial | Coefficient | | SEQ ID | alpha = | alpha = | Tissue | Concentration |
| Category | (UniProt) | Name | Score | AUC | CV | Transition | NO: | 36.16 | 26.25 | Candidate | (ng/ml) |
| Classifier | TSP1_HUMAN | THBS1 | 1.8 | 0.25 | 0.24 | GFLLLASLR_495.31_559.40 | 6521 | 0.53 | 0.44 | | 510 |
| Classifier | COIA1_HUMAN | COL18A1 | 3.7 | 0.16 | 0.25 | AVGLAGTFR_446.26_721.40 | 6522 | −1.56 | −0.91 | | 35 |
| Classifier | ISLR_HUMAN | ISLR | 1.4 | 0.32 | 0.25 | ALPGTPVASSQPR_640.85_841.50 | 6523 | 1.40 | 0.83 | | — |
| Classifier | TETN_HUMAN | CLEC3B | 2.5 | 0.26 | 0.26 | LDTLAQEVALLK_657.39_330.20 | 6524 | −1.79 | −1.02 | | 58000 |
| Classifier | FRIL_HUMAN | FTL | 2.8 | 0.31 | 0.26 | LGGPEAGLGEYLFER_804.40_913.40 | 6525 | 0.39 | 0.17 | Secreted, | 12 |
| | | | | | | | | | | Epi, | |
| | | | | | | | | | | Endo | |
| Classifier | GRP78_HUMAN | HSPA5 | 1.4 | 0.27 | 0.27 | TWNDPSVQQDIK_715.85_260.20 | 6526 | 1.41 | 0.55 | Secreted, | 100 |
| | | | | | | | | | | Epi, | |
| | | | | | | | | | | Endo | |
| Classifier | ALDOA_HUMAN | ALDOA | 1.3 | 0.26 | 0.28 | ALQASALK_401.25_617.40 | 6527 | −0.80 | −0.26 | Secreted, | 250 |
| | | | | | | | | | | Epi | |
| Classifier | BGH3_HUMAN | TGFBI | 1.8 | 0.21 | 0.28 | LTLLAPLNSVFK_658.40_804.50 | 6528 | 1.73 | 0.54 | Epi | 140 |
| Classifier | LG3BP_HUMAN | LGALS3BP | 4.3 | 0.29 | 0.29 | VEIFYR_413.73_598.30 | 6529 | −0.58 | −0.21 | Secreted | 440 |
| Classifier | LRP1_HUMAN | LRP1 | 4.0 | 0.13 | 0.32 | TVLWPNGLSLDIPAGR_855.00_400.20 | 6530 | −1.59 | −0.83 | Epi | 20 |
| Classifier | FIBA_HUMAN | FGA | 1.1 | 0.31 | 0.35 | NSLFEYQK_514.76_714.30 | 6531 | 0.31 | 0.13 | | 130000 |
| Classifier | PRDX1_HUMAN | PRDX1 | 1.5 | 0.32 | 0.37 | QITVNDLPVGR_606.30_428.30 | 6532 | −0.34 | −0.26 | Epi | 60 |
| Classifier | GSLG1_HUMAN | GLG1 | 1.2 | 0.34 | 0.45 | IIIQESALDYR_660.86_338.20 | 6533 | −0.70 | −0.44 | Epi, | — |
| | | | | | | | | | | Endo | |
| Robust | KIT_HUMAN | KIT | 1.4 | 0.33 | 0.46 | | | | | | 8.2 |
| Robust | CD14_HUMAN | CD14 | 4.0 | 0.33 | 0.48 | | | | | Epi | 420 |
| Robust | EF1A1_HUMAN | EEF1A1 | 1.2 | 0.32 | 0.56 | | | | | Secreted, | 61 |
| | | | | | | | | | | Epi | |
| Robust | TENX_HUMAN | TNXB | 1.1 | 0.30 | 0.56 | | | | | Endo | 70 |
| Robust | AIFM1_HUMAN | AIFM1 | 1.4 | 0.32 | 0.70 | | | | | Epi, | 1.4 |
| | | | | | | | | | | Endo | |
| Robust | GGH_HUMAN | GGH | 1.3 | 0.32 | 0.81 | | | | | | 250 |
| Robust | IBP3_HUMAN | IGFBP3 | 3.4 | 0.32 | 1.82 | | | | | | 5700 |
| Robust | ENPL_HUMAN | HSP90B1 | 1.1 | 0.29 | 5.90 | | | | | Secreted, | 88 |
| | | | | | | | | | | Epi, | |
| | | | | | | | | | | Endo | |
| Non-Robust | ERO1A_HUMAN | ERO1L | 6.2 | | | | | | | Secreted, | — |
| | | | | | | | | | | Epi, | |
| | | | | | | | | | | Endo | |
| Non-Robust | 6PGD_HUMAN | PGD | 4.3 | | | | | | | Epi, | 29 |
| | | | | | | | | | | Endo | |
| Non-Robust | ICAM1_HUMAN | ICAM1 | 3.9 | | | | | | | | 71 |
| Non-Robust | PTPA_HUMAN | PPP2R4 | 2.1 | | | | | | | Endo | 3.3 |
| Non-Robust | NCF4_HUMAN | NCF4 | 2.0 | | | | | | | Endo | — |
| Non-Robust | SEM3G_HUMAN | SEMA3G | 1.9 | | | | | | | | — |
| Non-Robust | 1433T_HUMAN | YWHAQ | 1.5 | | | | | | | Epi | 180 |
| Non-Robust | RAP2B_HUMAN | RAP2B | 1.5 | | | | | | | Epi | — |
| Non-Robust | MMP9_HUMAN | MMP9 | 1.4 | | | | | | | | 28 |
| Non-Robust | FOLH1_HUMAN | FOLH1 | 1.3 | | | | | | | | — |
| Non-Robust | GSTP1_HUMAN | GSTP1 | 1.3 | | | | | | | Endo | 32 |
| Non-Robust | EF2_HUMAN | EEF2 | 1.3 | | | | | | | Secreted, | 30 |
| | | | | | | | | | | Epi | |
| Non-Robust | RAN_HUMAN | RAN | 1.2 | | | | | | | Secreted, | 4.6 |
| | | | | | | | | | | Epi | |
| Non-Robust | SODM_HUMAN | SOD2 | 1.2 | | | | | | | Secreted | 7.1 |
| Non-Robust | DSG2_HUMAN | DSG2 | 1.1 | | | | | | | Endo | 2.7 |

LENGTHY TABLES
The patent application contains a lengthy table section. A copy of the table is available in electronic form from the USPTO web site (http://seqdata.uspto.gov/?pageRequest=docDetail&DocID=US20130203096A1). An electronic copy of the table will also be available from the USPTO upon request and payment of the fee set forth in 37 CFR 1.19(b)(3).

MEGA

The application's sequence listing, which the Patent Office published only in electronic form, follows.

SEQUENCE LISTING (6533 sequences)

SEQ ID NO: 1 - protein, 14 aa, Homo sapiens
AVTEQGHELSNEER

SEQ ID NO: 2 - protein, 14 aa, Homo sapiens
AVTEQGHELSNEER

SEQ ID NO: 3 - protein, 14 aa, Homo sapiens
AVTEQGHELSNEER

SEQ ID NO: 4 - protein, 14 aa, Homo sapiens
AVTEQGHELSNEER

SEQ ID NO: 5 - protein, 22 aa, Homo sapiens
DNLTLWTSENQGDEGDAGEGEN

SEQ ID NO: 6 - protein, 6 aa, Homo sapiens
SELVQK

SEQ ID NO: 7 - protein, 6 aa, Homo sapiens
SELVQK

SEQ ID NO: 8 - protein, 6 aa, Homo sapiens
SELVQK

SEQ ID NO: 9 - protein, 6 aa, Homo sapiens
SELVQK

SEQ ID NO: 10 - protein, 19 aa, Homo sapiens
TAFDEAIAELDTLNEESYK

SEQ ID NO: 11 - protein, 19 aa, Homo sapiens
TAFDEAIAELDTLNEESYK

SEQ ID NO: 12 - protein, 19 aa, Homo sapiens
TAFDEAIAELDTLNEESYK

SEQ ID NO: 13 - protein, 19 aa, Homo sapiens
TAFDEAIAELDTLNEESYK

SEQ ID NO: 14 - protein, 12 aa, Homo sapiens
YLIPNATQPESK

SEQ ID NO: 15 - protein, 12 aa, Homo sapiens
YLIPNATQPESK

SEQ ID NO: 16 - protein, 12 aa, Homo sapiens
YLIPNATQPESK

SEQ ID NO: 17 - protein, 12 aa, Homo sapiens
YLIPNATQPESK

SEQ ID NO: 18 - protein, 19 aa, Homo sapiens
AAFDDAIAELDTLSEESYK

SEQ ID NO: 19 - protein, 19 aa, Homo sapiens
AAFDDAIAELDTLSEESYK

SEQ ID NO: 20 - protein, 19 aa, Homo sapiens
AAFDDAIAELDTLSEESYK

SEQ ID NO: 21 - protein, 19 aa, Homo sapiens
AAFDDAIAELDTLSEESYK

SEQ ID NO: 22 - protein, 8 aa, Homo sapiens
EDLVYQAK

SEQ ID NO: 23 - protein, 8 aa, Homo sapiens
EDLVYQAK

SEQ ID NO: 24 - protein, 8 aa, Homo sapiens
EDLVYQAK

SEQ ID NO: 25 - protein, 8 aa, Homo sapiens
EDLVYQAK

SEQ ID NO: 26 - protein, 12 aa, Homo sapiens
HLIPAANTGESK

SEQ ID NO: 27 - protein, 12 aa, Homo sapiens
HLIPAANTGESK

SEQ ID NO: 28 - protein, 12 aa, Homo sapiens
HLIPAANTGESK

SEQ ID NO: 29 - protein, 12 aa, Homo sapiens
HLIPAANTGESK

SEQ ID NO: 30 - protein, 8 aa, Homo sapiens
IISSIEQK

SEQ ID NO: 31 - protein, 8 aa, Homo sapiens
IISSIEQK

SEQ ID NO: 32 - protein, 8 aa, Homo sapiens
IISSIEQK

SEQ ID NO: 33 - protein, 8 aa, Homo sapiens
IISSIEQK

SEQ ID NO: 34 - protein, 5 aa, Homo sapiens
VFYYK

SEQ ID NO: 35 - protein, 5 aa, Homo sapiens
VFYYK

SEQ ID NO: 36 - protein, 5 aa, Homo sapiens
VFYYK

SEQ ID NO: 37 - protein, 5 aa, Homo sapiens
VFYYK

SEQ ID NO: 38 - protein, 24 aa, Homo sapiens
DNLTLWTADNAGEEGGEAPQEPQS

SEQ ID NO: 39 - protein, 8 aa, Homo sapiens
EAGDAESR

SEQ ID NO: 40 - protein, 8 aa, Homo sapiens
EAGDAESR

SEQ ID NO: 41 - protein, 8 aa, Homo sapiens
EAGDAESR

SEQ ID NO: 42 - protein, 8 aa, Homo sapiens
EAGDAESR

SEQ ID NO: 43 - protein, 26 aa, Homo sapiens
LGLALNFSVFHYEIANSPEEAISLAK

SEQ ID NO: 44 - protein, 9 aa, Homo sapiens
SNEEGSEEK

SEQ ID NO: 45 - protein, 9 aa, Homo sapiens
SNEEGSEEK

SEQ ID NO: 46 - protein, 9 aa, Homo sapiens
SNEEGSEEK

SEQ ID NO: 47 - protein, 9 aa, Homo sapiens
SNEEGSEEK

SEQ ID NO: 48 - protein, 8 aa, Homo sapiens
VLSSIEQK

SEQ ID NO: 49 - protein, 8 aa, Homo sapiens
VLSSIEQK

SEQ ID NO: 50 - protein, 8 aa, Homo sapiens
VLSSIEQK

SEQ ID NO: 51 - protein, 8 aa, Homo sapiens
VLSSIEQK

SEQ ID NO: 52 - protein, 14 aa, Homo sapiens
AVTEQGAELSNEER

SEQ ID NO: 53 - protein, 14 aa, Homo sapiens
AVTEQGAELSNEER

SEQ ID NO: 54 - protein, 14 aa, Homo sapiens
AVTEQGAELSNEER

SEQ ID NO: 55 - protein, 14 aa, Homo sapiens
AVTEQGAELSNEER

SEQ ID NO: 56 - protein, 9 aa, Homo sapiens
EMQPTHPIR

SEQ ID NO: 57 - protein, 9 aa, Homo sapiens
EMQPTHPIR

SEQ ID NO: 58 - protein, 9 aa, Homo sapiens
EMQPTHPIR

SEQ ID NO: 59 - protein, 9 aa, Homo sapiens
EMQPTHPIR

SEQ ID NO: 60 - protein, 18 aa, Homo sapiens
QTIDNSQGAYQEAFDISK

SEQ ID NO: 61 - protein, 18 aa, Homo sapiens
QTIDNSQGAYQEAFDISK

SEQ ID NO: 62 - protein, 18 aa, Homo sapiens
QTIDNSQGAYQEAFDISK

SEQ ID NO: 63 - protein, 18 aa, Homo sapiens
QTIDNSQGAYQEAFDISK

SEQ ID NO: 64 - protein, 19 aa, Homo sapiens
TAFDEAIAELDTLNEDSYK

SEQ ID NO: 65 - protein, 19 aa, Homo sapiens
TAFDEAIAELDTLNEDSYK

SEQ ID NO: 66 - protein, 19 aa, Homo sapiens
TAFDEAIAELDTLNEDSYK

SEQ ID NO: 67 - protein, 19 aa, Homo sapiens
TAFDEAIAELDTLNEDSYK

SEQ ID NO: 68 - protein, 19 aa, Homo sapiens
TAFDEAIAELDTLNEDSYK

SEQ ID NO: 69 - protein, 19 aa, Homo sapiens
TAFDEAIAELDTLNEDSYK

SEQ ID NO: 70 - protein, 19 aa, Homo sapiens
TAFDEAIAELDTLNEDSYK

SEQ ID NO: 71 - protein, 19 aa, Homo sapiens
TAFDEAIAELDTLNEDSYK

SEQ ID NO: 72 - protein, 12 aa, Homo sapiens
YLIANATNPESK

SEQ ID NO: 73 - protein, 12 aa, Homo sapiens
YLIANATNPESK

SEQ ID NO: 74 - protein, 12 aa, Homo sapiens
YLIANATNPESK

SEQ ID NO: 75 - protein, 12 aa, Homo sapiens
YLIANATNPESK

SEQ ID NO: 76 - protein, 12 aa, Homo sapiens
FLIPNASQAESK

SEQ ID NO: 77 - protein, 12 aa, Homo sapiens
FLIPNASQAESK

SEQ ID NO: 78 - protein, 12 aa, Homo sapiens
FLIPNASQAESK

SEQ ID NO: 79 - protein, 12 aa, Homo sapiens
FLIPNASQAESK

SEQ ID NO: 80 - protein, 18 aa, Homo sapiens
GIVDQSQQAYQEAFEISK

SEQ ID NO: 81 - protein, 18 aa, Homo sapiens
GIVDQSQQAYQEAFEISK

SEQ ID NO: 82 - protein, 18 aa, Homo sapiens
GIVDQSQQAYQEAFEISK

SEQ ID NO: 83 - protein, 18 aa, Homo sapiens
GIVDQSQQAYQEAFEISK

SEQ ID NO: 84 - protein, 14 aa, Homo sapiens
SVTEQGAELSNEER

SEQ ID NO: 85 - protein, 14 aa, Homo sapiens
SVTEQGAELSNEER

SEQ ID NO: 86 - protein, 14 aa, Homo sapiens
SVTEQGAELSNEER

SEQ ID NO: 87 - protein, 14 aa, Homo sapiens
SVTEQGAELSNEER

SEQ ID NO: 88 - protein, 19 aa, Homo sapiens
TAFDEAIAELDTLSEESYK

SEQ ID NO: 89 - protein, 19 aa, Homo sapiens
TAFDEAIAELDTLSEESYK

SEQ ID NO: 90 - protein, 19 aa, Homo sapiens
TAFDEAIAELDTLSEESYK

SEQ ID NO: 91 - protein, 19 aa, Homo sapiens
TAFDEAIAELDTLSEESYK

SEQ ID NO: 92 - protein, 19 aa, Homo sapiens
TAFDEAIAELDTLSEESYK

SEQ ID NO: 93 - protein, 19 aa, Homo sapiens
TAFDEAIAELDTLSEESYK

SEQ ID NO: 94 - protein, 19 aa, Homo sapiens
TAFDEAIAELDTLSEESYK

SEQ ID NO: 95 - protein, 19 aa, Homo sapiens
TAFDEAIAELDTLSEESYK

SEQ ID NO: 96 - protein, 11 aa, Homo sapiens
AGQAVDDFIEK

SEQ ID NO: 97 - protein, 11 aa, Homo sapiens
AGQAVDDFIEK

SEQ ID NO: 98 - protein, 11 aa, Homo sapiens
AGQAVDDFIEK

SEQ ID NO: 99 - protein, 11 aa, Homo sapiens
AGQAVDDFIEK

SEQ ID NO: 100 - protein, 13 aa, Homo sapiens
HEMLPASLIQAQR

SEQ ID NO: 101 - protein, 13 aa, Homo sapiens
HEMLPASLIQAQR

SEQ ID NO: 102 - protein, 13 aa, Homo sapiens
HEMLPASLIQAQR

SEQ ID NO: 103 - protein, 13 aa, Homo sapiens
HEMLPASLIQAQR

SEQ ID NO: 104 - protein, 20 aa, Homo sapiens
LVPLLDTGDIIIDGGNSEYR

SEQ ID NO: 105 - protein, 20 aa, Homo sapiens
LVPLLDTGDIIIDGGNSEYR

SEQ ID NO: 106 - protein, 20 aa, Homo sapiens
LVPLLDTGDIIIDGGNSEYR

SEQ ID NO: 107 - protein, 20 aa, Homo sapiens
LVPLLDTGDIIIDGGNSEYR

SEQ ID NO: 108 - protein, 11 aa, Homo sapiens
YGPSLMPGGNK

SEQ ID NO: 109 - protein, 11 aa, Homo sapiens
YGPSLMPGGNK

SEQ ID NO: 110 - protein, 11 aa, Homo sapiens
YGPSLMPGGNK

SEQ ID NO: 111 - protein, 11 aa, Homo sapiens
YGPSLMPGGNK

SEQ ID NO: 112 - protein, 15 aa, Homo sapiens
NWGLSVYADKPETTK

SEQ ID NO: 113 - protein, 15 aa, Homo sapiens
NWGLSVYADKPETTK

SEQ ID NO: 114 - protein, 15 aa, Homo sapiens
NWGLSVYADKPETTK

SEQ ID NO: 115 - protein, 15 aa, Homo sapiens
NWGLSVYADKPETTK

SEQ ID NO: 116 - protein, 16 aa, Homo sapiens
SVQEIQATFFYFTPNK

SEQ ID NO: 117 - protein, 8 aa, Homo sapiens
TEDTIFLR

SEQ ID NO: 118 - protein, 8 aa, Homo sapiens
TEDTIFLR

SEQ ID NO: 119 - protein, 8 aa, Homo sapiens
TEDTIFLR

SEQ ID NO: 120 - protein, 8 aa, Homo sapiens
TEDTIFLR

SEQ ID NO: 121 - protein, 9 aa, Homo sapiens
WFYIASAFR

SEQ ID NO: 122 - protein, 9 aa, Homo sapiens
WFYIASAFR

SEQ ID NO: 123 - protein, 9 aa, Homo sapiens
WFYIASAFR

SEQ ID NO: 124 - protein, 9 aa, Homo sapiens
WFYIASAFR

SEQ ID NO: 125 - protein, 15 aa, Homo sapiens
YVGGQEHFAHLLILR

SEQ ID NO: 126 - protein, 15 aa, Homo sapiens
YVGGQEHFAHLLILR

SEQ ID NO: 127 - protein, 15 aa, Homo sapiens
YVGGQEHFAHLLILR

SEQ ID NO: 128 - protein, 15 aa, Homo sapiens
YVGGQEHFAHLLILR

SEQ ID NO: 129 - protein, 17 aa, Homo sapiens
DAGIALLSITHRPSLWK

SEQ ID NO: 130 - protein, 17 aa, Homo sapiens
DAGIALLSITHRPSLWK

SEQ ID NO: 131 - protein, 17 aa, Homo sapiens
DAGIALLSITHRPSLWK

SEQ ID NO: 132 - protein, 17 aa, Homo sapiens
DAGIALLSITHRPSLWK

SEQ ID NO: 133 - protein, 14 aa, Homo sapiens
ELEDAQAGSGTIGR

SEQ ID NO: 134 - protein, 20 aa, Homo sapiens
GLQAPAGEPTQEASGVAAAK

SEQ ID NO: 135 - protein, 20 aa, Homo sapiens
GLQAPAGEPTQEASGVAAAK

SEQ ID NO: 136 - protein, 20 aa, Homo sapiens
GLQAPAGEPTQEASGVAAAK

SEQ ID NO: 137 - protein, 20 aa, Homo sapiens
GLQAPAGEPTQEASGVAAAK

SEQ ID NO: 138 - protein, 12 aa, Homo sapiens
NLLTAAADAIER

SEQ ID NO: 139 - protein, 12 aa, Homo sapiens
NLLTAAADAIER

SEQ ID NO: 140 - protein, 12 aa, Homo sapiens
NLLTAAADAIER

SEQ ID NO: 141 - protein, 12 aa, Homo sapiens
NLLTAAADAIER

SEQ ID NO: 142 - protein, 15 aa, Homo sapiens
YHTHLLQFDGEGGWK

SEQ ID NO: 143 - protein, 15 aa, Homo sapiens
YHTHLLQFDGEGGWK

SEQ ID NO: 144 - protein, 15 aa, Homo sapiens
YHTHLLQFDGEGGWK

SEQ ID NO: 145 - protein, 15 aa, Homo sapiens
YHTHLLQFDGEGGWK

SEQ ID NO: 146 - protein, 19 aa, Homo sapiens
ADEVVSASVGSGDLWIPVK

SEQ ID NO: 147 - protein, 19 aa, Homo sapiens
ADEVVSASVGSGDLWIPVK

SEQ ID NO: 148 - protein, 19 aa, Homo sapiens
ADEVVSASVGSGDLWIPVK

SEQ ID NO: 149 - protein, 19 aa, Homo sapiens
ADEVVSASVGSGDLWIPVK

SEQ ID NO: 150 - protein, 13 aa, Homo sapiens
FGFGGSTDSGPIR

SEQ ID NO: 151 - protein, 13 aa, Homo sapiens
FGFGGSTDSGPIR

SEQ ID NO: 152 - protein, 13 aa, Homo sapiens
FGFGGSTDSGPIR

SEQ ID NO: 153 - protein, 13 aa, Homo sapiens
FGFGGSTDSGPIR

SEQ ID NO: 154 - protein, 10 aa, Homo sapiens
LIEIANHVDK

SEQ ID NO: 155 - protein, 10 aa, Homo sapiens
LIEIANHVDK

SEQ ID NO: 156 - protein, 10 aa, Homo sapiens
LIEIANHVDK

SEQ ID NO: 157 - protein, 10 aa, Homo sapiens
LIEIANHVDK

SEQ ID NO: 158 - protein, 9 aa, Homo sapiens
NHPEVLNIR

SEQ ID NO: 159 - protein, 9 aa, Homo sapiens
NHPEVLNIR

SEQ ID NO: 160 - protein, 9 aa, Homo sapiens
NHPEVLNIR

SEQ ID NO: 161 - protein, 9 aa, Homo sapiens
NHPEVLNIR

SEQ ID NO: 162 - protein, 11 aa, Homo sapiens
YVELVIVADNR

SEQ ID NO: 163 - protein, 11 aa, Homo sapiens
LAHQIYQFTDK

SEQ ID NO: 164 - protein, 11 aa, Homo sapiens
LAHQIYQFTDK

SEQ ID NO: 165 - protein, 11 aa, Homo sapiens
LAHQIYQFTDK

SEQ ID NO: 166 - protein, 11 aa, Homo sapiens
LAHQIYQFTDK

SEQ ID NO: 167 - protein, 11 aa, Homo sapiens
SPEDSSPDAAR

SEQ ID NO: 168 - protein, 11 aa, Homo sapiens
SPEDSSPDAAR

SEQ ID NO: 169 - protein, 11 aa, Homo sapiens
SPEDSSPDAAR

SEQ ID NO: 170 - protein, 11 aa, Homo sapiens
SPEDSSPDAAR

SEQ ID NO: 171 - protein, 24 aa, Homo sapiens
TLVSSKPQAHGAPAPPSGSAPHFL

SEQ ID NO: 172 - protein, 18 aa, Homo sapiens
GWGDQLIWTQTYEEALYK

SEQ ID NO: 173 - protein, 11 aa, Homo sapiens
HLSPDGQYVPR

SEQ ID NO: 174 - protein, 18 aa, Homo sapiens
IPVSAFLLLVALSYTLAR

SEQ ID NO: 175 - protein, 17 aa, Homo sapiens
LAEQFVLLNLVYETTDK

SEQ ID NO: 176 - protein, 7 aa, Homo sapiens
LPQTLSR

SEQ ID NO: 177 - protein, 13 aa, Homo sapiens
ALGTEVIQLFPEK

SEQ ID NO: 178 - protein, 13 aa, Homo sapiens
ALGTEVIQLFPEK

SEQ ID NO: 179 - protein, 13 aa, Homo sapiens
ALGTEVIQLFPEK

SEQ ID NO: 180 - protein, 13 aa, Homo sapiens
ALGTEVIQLFPEK

SEQ ID NO: 181 - protein, 12 aa, Homo sapiens
ELWFSDDPNVTK

SEQ ID NO: 182 - protein, 12 aa, Homo sapiens
ELWFSDDPNVTK

SEQ ID NO: 183 - protein, 12 aa, Homo sapiens
ELWFSDDPNVTK

SEQ ID NO: 184 - protein, 12 aa, Homo sapiens
ELWFSDDPNVTK

SEQ ID NO: 185 - protein, 7 aa, Homo sapiens
GVIFYLR

SEQ ID NO: 186 - protein, 7 aa, Homo sapiens
GVIFYLR

SEQ ID NO: 187 - protein, 7 aa, Homo sapiens
GVIFYLR

SEQ ID NO: 188 - protein, 7 aa, Homo sapiens
GVIFYLR

SEQ ID NO: 189 - protein, 11 aa, Homo sapiens
LNDGSQITYEK

SEQ ID NO: 190 - protein, 11 aa, Homo sapiens
LNDGSQITYEK

SEQ ID NO: 191 - protein, 11 aa, Homo sapiens
LNDGSQITYEK

SEQ ID NO: 192 - protein, 11 aa, Homo sapiens
LNDGSQITYEK

SEQ ID NO: 193 - protein, 14 aa, Homo sapiens
TGGLEIDSDFGGFR

SEQ ID NO: 194 - protein, 14 aa, Homo sapiens
TGGLEIDSDFGGFR

SEQ ID NO: 195 - protein, 14 aa, Homo sapiens
TGGLEIDSDFGGFR

SEQ ID NO: 196 - protein, 14 aa, Homo sapiens
TGGLEIDSDFGGFR

SEQ ID NO: 197 - protein, 12 aa, Homo sapiens
ADDGRPFPQVIK

SEQ ID NO: 198 - protein, 12 aa, Homo sapiens
ADDGRPFPQVIK

SEQ ID NO: 199 - protein, 12 aa, Homo sapiens
ADDGRPFPQVIK

SEQ ID NO: 200 - protein, 12 aa, Homo sapiens
ADDGRPFPQVIK

SEQ ID NO: 201 - protein, 8 aa, Homo sapiens
ALQASALK

SEQ ID NO: 202 - protein, 8 aa, Homo sapiens
ALQASALK

SEQ ID NO: 203 - protein, 8 aa, Homo sapiens
ALQASALK

SEQ ID NO: 204 - protein, 8 aa, Homo sapiens
ALQASALK

SEQ ID NO: 205 - protein, 23 aa, Homo sapiens
GVVPLAGTNGETTTQGLDGLSER

SEQ ID NO: 206 - protein, 9 aa, Homo sapiens
QLLLTADDR

SEQ ID NO: 207 - protein, 9 aa, Homo sapiens
QLLLTADDR

SEQ ID NO: 208 - protein, 9 aa, Homo sapiens
QLLLTADDR

SEQ ID NO: 209 - protein, 9 aa, Homo sapiens
QLLLTADDR

SEQ ID NO: 210 - protein, 22 aa, Homo sapiens
YTPSGQAGAAASESLFVSNHAY

SEQ ID NO: 211 - protein, 8 aa, Homo sapiens
ALEQALEK

SEQ ID NO: 212 - protein, 8 aa, Homo sapiens
ALEQALEK

SEQ ID NO: 213 - protein, 8 aa, Homo sapiens
ALEQALEK

SEQ ID NO: 214 - protein, 8 aa, Homo sapiens
ALEQALEK

SEQ ID NO: 215 - protein, 10 aa, Homo sapiens
DHSAIPVINR

SEQ ID NO: 216 - protein, 10 aa, Homo sapiens
DHSAIPVINR

SEQ ID NO: 217 - protein, 10 aa, Homo sapiens
DHSAIPVINR

SEQ ID NO: 218 - protein, 10 aa, Homo sapiens
DHSAIPVINR

SEQ ID NO: 219 - protein, 16 aa, Homo sapiens
ENSLLFDPLSSSSSNK

SEQ ID NO: 220 - protein, 16 aa, Homo sapiens
ENSLLFDPLSSSSSNK

SEQ ID NO: 221 - protein, 16 aa, Homo sapiens
ENSLLFDPLSSSSSNK

SEQ ID NO: 222 - protein, 16 aa, Homo sapiens
ENSLLFDPLSSSSSNK

SEQ ID NO: 223 - protein, 12 aa, Homo sapiens
EVVLQWFTENSK

SEQ ID NO: 224 - protein, 12 aa, Homo sapiens
EVVLQWFTENSK

SEQ ID NO: 225 - protein, 12 aa, Homo sapiens
EVVLQWFTENSK

SEQ ID NO: 226 - protein, 12 aa, Homo sapiens
EVVLQWFTENSK

SEQ ID NO: 227 - protein, 9 aa, Homo sapiens
SIQLPTTVR

SEQ ID NO: 228 - protein, 9 aa, Homo sapiens
SIQLPTTVR

SEQ ID NO: 229 - protein, 9 aa, Homo sapiens
SIQLPTTVR

SEQ ID NO: 230 - protein, 9 aa, Homo sapiens
SIQLPTTVR

SEQ ID NO: 231 - protein, 13 aa, Homo sapiens
DAPHVEPDFSSQK

SEQ ID NO: 232 - protein, 13 aa, Homo sapiens
DAPHVEPDFSSQK

SEQ ID NO: 233 - protein, 13 aa, Homo sapiens
DAPHVEPDFSSQK

SEQ ID NO: 234 - protein, 13 aa, Homo sapiens
DAPHVEPDFSSQK

SEQ ID NO: 235 - protein, 14 aa, Homo sapiens
LEIQLLENSLSTYK

SEQ ID NO: 236 - protein, 14 aa, Homo sapiens
LEIQLLENSLSTYK

SEQ ID NO: 237 - protein, 14 aa, Homo sapiens
LEIQLLENSLSTYK

SEQ ID NO: 238 - protein, 14 aa, Homo sapiens
LEIQLLENSLSTYK

SEQ ID NO: 239 - protein, 11 aa, Homo sapiens
QLLQQTNEILK

SEQ ID NO: 240 - protein, 11 aa, Homo sapiens
QLLQQTNEILK

SEQ ID NO: 241 - protein, 11 aa, Homo sapiens
QLLQQTNEILK

SEQ ID NO: 242 - protein, 11 aa, Homo sapiens
QLLQQTNEILK

SEQ ID NO: 243 - protein, 14 aa, Homo sapiens
QSSLILHGADFSTK

SEQ ID NO: 244 - protein, 14 aa, Homo sapiens
QSSLILHGADFSTK

SEQ ID NO: 245 - protein, 14 aa, Homo sapiens
QSSLILHGADFSTK

SEQ ID NO: 246 - protein, 14 aa, Homo sapiens
QSSLILHGADFSTK

SEQ ID NO: 247 - protein, 10 aa, Homo sapiens
QTYIIQELEK

SEQ ID NO: 248 - protein, 10 aa, Homo sapiens
QTYIIQELEK

SEQ ID NO: 249 - protein, 10 aa, Homo sapiens
QTYIIQELEK

SEQ ID NO: 250 - protein, 10 aa, Homo sapiens
QTYIIQELEK

SEQ ID NO: 251 - protein, 12 aa, Homo sapiens
DAPLEYDDSVQR

SEQ ID NO: 252 - protein, 12 aa, Homo sapiens
DAPLEYDDSVQR

SEQ ID NO: 253 - protein, 12 aa, Homo sapiens
DAPLEYDDSVQR

SEQ ID NO: 254 - protein, 12 aa, Homo sapiens
DAPLEYDDSVQR

SEQ ID NO: 255 - protein, 9 aa, Homo sapiens
DQLQVLVSK

SEQ ID NO: 256 - protein, 9 aa, Homo sapiens
DQLQVLVSK

SEQ ID NO: 257 - protein, 9 aa, Homo sapiens
DQLQVLVSK

SEQ ID NO: 258 - protein, 9 aa, Homo sapiens
DQLQVLVSK

SEQ ID NO: 259 - protein, 14 aa, Homo sapiens
ISSISQPGNDFSTK

SEQ ID NO: 260 - protein, 14 aa, Homo sapiens
ISSISQPGNDFSTK

SEQ ID NO: 261 - protein, 14 aa, Homo sapiens
ISSISQPGNDFSTK

SEQ ID NO: 262 - protein, 14 aa, Homo sapiens
ISSISQPGNDFSTK

SEQ ID NO: 263 - protein, 11 aa, Homo sapiens
QILDQTSEINK

SEQ ID NO: 264 - protein, 11 aa, Homo sapiens
QILDQTSEINK

SEQ ID NO: 265 - protein, 11 aa, Homo sapiens
QILDQTSEINK

SEQ ID NO: 266 - protein, 11 aa, Homo sapiens
QILDQTSEINK

SEQ ID NO: 267 - protein, 13 aa, Homo sapiens
SSSSPYVSNAVQR

SEQ ID NO: 268 - protein, 13 aa, Homo sapiens
SSSSPYVSNAVQR

SEQ ID NO: 269 - protein, 13 aa, Homo sapiens
SSSSPYVSNAVQR

SEQ ID NO: 270 - protein, 13 aa, Homo sapiens
SSSSPYVSNAVQR

SEQ ID NO: 271 - protein, 8 aa, Homo sapiens
AELQEGAR

SEQ ID NO: 272 - protein, 8 aa, Homo sapiens
AELQEGAR

SEQ ID NO: 273 - protein, 8 aa, Homo sapiens
AELQEGAR

SEQ ID NO: 274 - protein, 8 aa, Homo sapiens
AELQEGAR

SEQ ID NO: 275 - protein, 9 aa, Homo sapiens
AKPALEDLR

SEQ ID NO: 276 - protein, 9 aa, Homo sapiens
AKPALEDLR

SEQ ID NO: 277 - protein, 9 aa, Homo sapiens
AKPALEDLR

SEQ ID NO: 278 - protein, 9 aa, Homo sapiens
AKPALEDLR

SEQ ID NO: 279 - protein, 11 aa, Homo sapiens
ATEHLSTLSEK

SEQ ID NO: 280 - protein, 11 aa, Homo sapiens
ATEHLSTLSEK

SEQ ID NO: 281 - protein, 11 aa, Homo sapiens
ATEHLSTLSEK

SEQ ID NO: 282 - protein, 11 aa, Homo sapiens
ATEHLSTLSEK

SEQ ID NO: 283 - protein, 7 aa, Homo sapiens
LAEYHAK

SEQ ID NO: 284 - protein, 7 aa, Homo sapiens
LAEYHAK

SEQ ID NO: 285 - protein, 7 aa, Homo sapiens
LAEYHAK

SEQ ID NO: 286 - protein, 7 aa, Homo sapiens
LHELQEK

SEQ ID NO: 287 - protein, 7 aa, Homo sapiens
LHELQEK

SEQ ID NO: 288 - protein, 7 aa, Homo sapiens
LHELQEK

SEQ ID NO: 289 - protein, 7 aa, Homo sapiens
LHELQEK

SEQ ID NO: 290 - protein, 15 aa, Homo sapiens
AATVGSLAGQPLQER

SEQ ID NO: 291 - protein, 15 aa, Homo sapiens
AATVGSLAGQPLQER

SEQ ID NO: 292 - protein, 15 aa, Homo sapiens
AATVGSLAGQPLQER

SEQ ID NO: 293 - protein, 15 aa, Homo sapiens
AATVGSLAGQPLQER

SEQ ID NO: 294 - protein, 8 aa, Homo sapiens
ALMDETMK

SEQ ID NO: 295 - protein, 8 aa, Homo sapiens
ALMDETMK

SEQ ID NO: 296 - protein, 8 aa, Homo sapiens
ALMDETMK

SEQ ID NO: 297 - protein, 8 aa, Homo sapiens
ALMDETMK

SEQ ID NO: 298 - protein, 6 aa, Homo sapiens
FWDYLR

SEQ ID NO: 299 - protein, 15 aa, Homo sapiens
GEVQAMLGQSTEELR

SEQ ID NO: 300 - protein, 15 aa, Homo sapiens
GEVQAMLGQSTEELR

SEQ ID NO: 301 - protein, 15 aa, Homo sapiens
GEVQAMLGQSTEELR

SEQ ID NO: 302 - protein, 15 aa, Homo sapiens
GEVQAMLGQSTEELR

SEQ ID NO: 303 - protein, 9 aa, Homo sapiens
LAVYQAGAR

SEQ ID NO: 304 - protein, 9 aa, Homo sapiens
LAVYQAGAR

SEQ ID NO: 305 - protein, 9 aa, Homo sapiens
LAVYQAGAR

SEQ ID NO: 306 - protein, 9 aa, Homo sapiens
LAVYQAGAR

SEQ ID NO: 307 - protein, 9 aa, Homo sapiens
LGPLVEQGR

SEQ ID NO: 308 - protein, 9 aa, Homo sapiens
LGPLVEQGR

SEQ ID NO: 309 - protein, 9 aa, Homo sapiens
LGPLVEQGR

SEQ ID NO: 310 - protein, 9 aa, Homo sapiens
LGPLVEQGR

SEQ ID NO: 311 - protein, 15 aa, Homo sapiens
SELEEQLTPVAEETR

SEQ ID NO: 312 - protein, 15 aa, Homo sapiens
SELEEQLTPVAEETR

SEQ ID NO: 313 - protein, 15 aa, Homo sapiens
SELEEQLTPVAEETR

SEQ ID NO: 314 - protein, 15 aa, Homo sapiens
SELEEQLTPVAEETR

SEQ ID NO: 315 - protein, 12 aa, Homo sapiens
SWFEPLVEDMQR

SEQ ID NO: 316 - protein, 12 aa, Homo sapiens
SWFEPLVEDMQR

SEQ ID NO: 317 - protein, 12 aa, Homo sapiens
SWFEPLVEDMQR

SEQ ID NO: 318 - protein, 12 aa, Homo sapiens
SWFEPLVEDMQR

SEQ ID NO: 319 - protein, 7 aa, Homo sapiens
WELALGR

SEQ ID NO: 320 - protein, 7 aa, Homo sapiens
WELALGR

SEQ ID NO: 321 - protein, 7 aa, Homo sapiens
WELALGR

SEQ ID NO: 322 - protein, 7 aa, Homo sapiens
WELALGR

SEQ ID NO: 323 - protein, 23 aa, Homo sapiens
WVQTLSEQVQEELLSSQVTQELR

SEQ ID NO: 324 - protein, 23 aa, Homo sapiens
EIEPEPDFILWTGDDTPHVPDEK

SEQ ID NO: 325 - protein, 23 aa, Homo sapiens
EIEPEPDFILWTGDDTPHVPDEK

SEQ ID NO: 326 - protein, 23 aa, Homo sapiens
EIEPEPDFILWTGDDTPHVPDEK

SEQ ID NO: 327 - protein, 23 aa, Homo sapiens
EIEPEPDFILWTGDDTPHVPDEK

SEQ ID NO: 328 - protein, 14 aa, Homo sapiens
FWHIADLHLDPDYK

SEQ ID NO: 329 - protein, 14 aa, Homo sapiens
FWHIADLHLDPDYK

SEQ ID NO: 330 - protein, 14 aa, Homo sapiens
FWHIADLHLDPDYK

SEQ ID NO: 331 - protein, 14 aa, Homo sapiens
FWHIADLHLDPDYK

SEQ ID NO: 332 - protein, 10 aa, Homo sapiens
IAGDQSTLQR

SEQ ID NO: 333 - protein, 10 aa, Homo sapiens
IAGDQSTLQR

SEQ ID NO: 334 - protein, 10 aa, Homo sapiens
IAGDQSTLQR

SEQ ID NO: 335 - protein, 10 aa, Homo sapiens
IAGDQSTLQR

SEQ ID NO: 336 - protein, 12 aa, Homo sapiens
LGEAAVLEIVER

SEQ ID NO: 337 - protein, 12 aa, Homo sapiens
LGEAAVLEIVER

SEQ ID NO: 338 - protein, 12 aa, Homo sapiens
LGEAAVLEIVER

SEQ ID NO: 339 - protein, 12 aa, Homo sapiens
LGEAAVLEIVER

SEQ ID NO: 340 - protein, 16 aa, Homo sapiens
VIAGQFFGHHHTDSFR

SEQ ID NO: 341 - protein, 15 aa, Homo sapiens
AEIGIAMGSGTAVAK

SEQ ID NO: 342 - protein, 15 aa, Homo sapiens
AEIGIAMGSGTAVAK

SEQ ID NO: 343 - protein, 15 aa, Homo sapiens
AEIGIAMGSGTAVAK

SEQ ID NO: 344 - protein, 15 aa, Homo sapiens
AEIGIAMGSGTAVAK

SEQ ID NO: 345 - protein, 13 aa, Homo sapiens
IGIFGQDEDVTSK

SEQ ID NO: 346 - protein, 13 aa, Homo sapiens
IGIFGQDEDVTSK

SEQ ID NO: 347 - protein, 13 aa, Homo sapiens
IGIFGQDEDVTSK

SEQ ID NO: 348 - protein, 13 aa, Homo sapiens
IGIFGQDEDVTSK

SEQ ID NO: 349 - protein, 13 aa, Homo sapiens
NMLFSGTNIAAGK

SEQ ID NO: 350 - protein, 13 aa, Homo sapiens
NMLFSGTNIAAGK

SEQ ID NO: 351 - protein, 13 aa, Homo sapiens
NMLFSGTNIAAGK

SEQ ID NO: 352 - protein, 13 aa, Homo sapiens
NMLFSGTNIAAGK

SEQ ID NO: 353 - protein, 14 aa, Homo sapiens
ASFGSGPAVEWIPK

SEQ ID NO: 354 - protein, 14 aa, Homo sapiens
ASFGSGPAVEWIPK

SEQ ID NO: 355 - protein, 14 aa, Homo sapiens
ASFGSGPAVEWIPK

SEQ ID NO: 356 - protein, 14 aa, Homo sapiens
ASFGSGPAVEWIPK

SEQ ID NO: 357 - protein, 21 aa, Homo sapiens
GAFYLLGEAYFIQPLPAASER

SEQ ID NO: 358 - protein, 21 aa, Homo sapiens
GAFYLLGEAYFIQPLPAASER

SEQ ID NO: 359 - protein, 21 aa, Homo sapiens
GAFYLLGEAYFIQPLPAASER

SEQ ID NO: 360 - protein, 21 aa, Homo sapiens
GAFYLLGEAYFIQPLPAASER

SEQ ID NO: 361 - protein, 11 aa, Homo sapiens
GIGYFFVLQPK

SEQ ID NO: 362 - protein, 11 aa, Homo sapiens
GIGYFFVLQPK

SEQ ID NO: 363 - protein, 11 aa, Homo sapiens
GIGYFFVLQPK

SEQ ID NO: 364 - protein, 11 aa, Homo sapiens
GIGYFFVLQPK

SEQ ID NO: 365 - protein, 13 aa, Homo sapiens
GPEVTSNAALTLR

SEQ ID NO: 366 - protein, 13 aa, Homo sapiens
GPEVTSNAALTLR

SEQ ID NO: 367 - protein, 13 aa, Homo sapiens
GPEVTSNAALTLR

SEQ ID NO: 368 - protein, 13 aa, Homo sapiens
GPEVTSNAALTLR

SEQ ID NO: 369 - protein, 12 aa, Homo sapiens
HYLLTLFSVAAR

SEQ ID NO: 370 - protein, 13 aa, Homo sapiens
EGSGYVDIGLIPK

SEQ ID NO: 371 - protein, 13 aa, Homo sapiens
EGSGYVDIGLIPK

SEQ ID NO: 372 - protein, 13 aa, Homo sapiens
EGSGYVDIGLIPK

SEQ ID NO: 373 - protein, 13 aa, Homo sapiens
EGSGYVDIGLIPK

SEQ ID NO: 374 - protein, 12 aa, Homo sapiens
LILLEEEEQGLK

SEQ ID NO: 375 - protein, 12 aa, Homo sapiens
LILLEEEEQGLK

SEQ ID NO: 376 - protein, 12 aa, Homo sapiens
LILLEEEEQGLK

SEQ ID NO: 377 - protein, 12 aa, Homo sapiens
LILLEEEEQGLK

SEQ ID NO: 378 - protein, 13 aa, Homo sapiens
QLQYDPTPLTWSK

SEQ ID NO: 379 - protein, 13 aa, Homo sapiens
QLQYDPTPLTWSK

SEQ ID NO: 380 - protein, 13 aa, Homo sapiens
QLQYDPTPLTWSK

SEQ ID NO: 381 - protein, 13 aa, Homo sapiens
QLQYDPTPLTWSK

SEQ ID NO: 382 - protein, 14 aa, Homo sapiens
QWQDSSTQPELSSR

SEQ ID NO: 383 - protein, 14 aa, Homo sapiens
QWQDSSTQPELSSR

SEQ ID NO: 384 - protein, 14 aa, Homo sapiens
QWQDSSTQPELSSR

SEQ ID NO: 385 - protein, 14 aa, Homo sapiens
QWQDSSTQPELSSR

SEQ ID NO: 386 - protein, 11 aa, Homo sapiens
WVETLVVADTK

SEQ ID NO: 387 - protein, 11 aa, Homo sapiens
WVETLVVADTK

SEQ ID NO: 388 - protein, 11 aa, Homo sapiens
WVETLVVADTK

SEQ ID NO: 389 - protein, 11 aa, Homo sapiens
WVETLVVADTK

SEQ ID NO: 390 - protein, 9 aa, Homo sapiens
EQPILLSEK

SEQ ID NO: 391 - protein, 9 aa, Homo sapiens
EQPILLSEK

SEQ ID NO: 392 - protein, 9 aa, Homo sapiens
EQPILLSEK

SEQ ID NO: 393 - protein, 9 aa, Homo sapiens
EQPILLSEK

SEQ ID NO: 394 - protein, 11 aa, Homo sapiens
GQNLGDVSWSR

SEQ ID NO: 395 - protein, 22 aa, Homo sapiens
LRPPPPSEGEEDEELESQELPR

SEQ ID NO: 396 - protein, 22 aa, Homo sapiens
LRPPPPSEGEEDEELESQELPR

SEQ ID NO: 397 - protein, 22 aa, Homo sapiens
LRPPPPSEGEEDEELESQELPR

SEQ ID NO: 398 - protein, 22 aa, Homo sapiens
LRPPPPSEGEEDEELESQELPR

SEQ ID NO: 399 - protein, 9 aa, Homo sapiens
NISIVDNEK

SEQ ID NO: 400 - protein, 9 aa, Homo sapiens
NISIVDNEK

SEQ ID NO: 401 - protein, 9 aa, Homo sapiens
NISIVDNEK

SEQ ID NO: 402 - protein, 9 aa, Homo sapiens
NISIVDNEK

SEQ ID NO: 403 - protein, 14 aa, Homo sapiens
SVAPVPLEEPVEGR

SEQ ID NO: 404 - protein, 14 aa, Homo sapiens
SVAPVPLEEPVEGR

SEQ ID NO: 405 - protein, 14 aa, Homo sapiens
SVAPVPLEEPVEGR

SEQ ID NO: 406 - protein, 14 aa, Homo sapiens
SVAPVPLEEPVEGR

SEQ ID NO: 407 - protein, 14 aa, Homo sapiens
AVFLALSAQLLQAR

SEQ ID NO: 408 - protein, 9 aa, Homo sapiens
EESPVVSWR

SEQ ID NO: 409 - protein, 9 aa, Homo sapiens
EESPVVSWR

SEQ ID NO: 410 - protein, 9 aa, Homo sapiens
EESPVVSWR

SEQ ID NO: 411 - protein, 9 aa, Homo sapiens
EESPVVSWR

SEQ ID NO: 412 - protein, 9 aa, Homo sapiens
EESPVVSWR

SEQ ID NO: 413 - protein, 9 aa, Homo sapiens
EESPVVSWR

SEQ ID NO: 414 - protein, 9 aa, Homo sapiens
EESPVVSWR

SEQ ID NO: 415 - protein, 9 aa, Homo sapiens
EESPVVSWR

SEQ ID NO: 416 - protein, 9 aa, Homo sapiens
EESPVVSWR

SEQ ID NO: 417 - protein, 9 aa, Homo sapiens
EESPVVSWR

SEQ ID NO: 418 - protein, 9 aa, Homo sapiens
EESPVVSWR

SEQ ID NO: 419 - protein, 9 aa, Homo sapiens
EESPVVSWR

SEQ ID NO: 420 - protein, 18 aa, Homo sapiens
EESPVVSWWLEPEDGTAL

SEQ ID NO: 421 - protein, 9 aa, Homo sapiens
EESPVVSWR

SEQ ID NO: 422 - protein, 9 aa, Homo sapiens
EESPVVSWR

SEQ ID NO: 423 - protein, 9 aa, Homo sapiens
EESPVVSWR

SEQ ID NO: 424 - protein, 9 aa, Homo sapiens
EESPVVSWR

SEQ ID NO: 425 - protein, 22 aa, Homo sapiens
AAEAAAAPAESAAPAAGEEPSK

SEQ ID NO: 426 - protein, 22 aa, Homo sapiens
AAEAAAAPAESAAPAAGEEPSK

SEQ ID NO: 427 - protein, 22 aa, Homo sapiens
AAEAAAAPAESAAPAAGEEPSK

SEQ ID NO: 428 - protein, 22 aa, Homo sapiens
AAEAAAAPAESAAPAAGEEPSK

SEQ ID NO: 429 - protein, 13 aa, Homo sapiens
AEGAATEEEGTPK

SEQ ID NO: 430 - protein, 13 aa, Homo sapiens
AEGAATEEEGTPK

SEQ ID NO: 431 - protein, 13 aa, Homo sapiens
AEGAATEEEGTPK

SEQ ID NO: 432 - protein, 13 aa, Homo sapiens
AEGAATEEEGTPK

SEQ ID NO: 433 - protein, 19 aa, Homo sapiens
APEQEQAAPGPAAGGEAPK

SEQ ID NO: 434 - protein, 19 aa, Homo sapiens
APEQEQAAPGPAAGGEAPK

SEQ ID NO: 435 - protein, 19 aa, Homo sapiens
APEQEQAAPGPAAGGEAPK

SEQ ID NO: 436 - protein, 19 aa, Homo sapiens
APEQEQAAPGPAAGGEAPK

SEQ ID NO: 437 - protein, 28 aa, Homo sapiens
AQGPAASAEEPKPVEAPAANSDQTVTVK

SEQ ID NO: 438 - protein, 10 aa, Homo sapiens
EKPDQDAEGK

SEQ ID NO: 439 - protein, 10 aa, Homo sapiens
EKPDQDAEGK

SEQ ID NO: 440 - protein, 10 aa, Homo sapiens
EKPDQDAEGK

SEQ ID NO: 441 - protein, 10 aa, Homo sapiens
EKPDQDAEGK

SEQ ID NO: 442 - protein, 14 aa, Homo sapiens
ESEPQAAAEPAEAK

SEQ ID NO: 443 - protein, 14 aa, Homo sapiens
ESEPQAAAEPAEAK

SEQ ID NO: 444 - protein, 14 aa, Homo sapiens
ESEPQAAAEPAEAK

SEQ ID NO: 445 - protein, 14 aa, Homo sapiens
ESEPQAAAEPAEAK

SEQ ID NO: 446 - protein, 14 aa, Homo sapiens
ETPAATEAPSSTPK

SEQ ID NO: 447 - protein, 14 aa, Homo sapiens
ETPAATEAPSSTPK

SEQ ID NO: 448 - protein, 14 aa, Homo sapiens
ETPAATEAPSSTPK

SEQ ID NO: 449 - protein, 14 aa, Homo sapiens
ETPAATEAPSSTPK

SEQ ID NO: 450 - protein, 8 aa, Homo sapiens
GYNVNDEK

SEQ ID NO: 451 - protein, 8 aa, Homo sapiens
GYNVNDEK

SEQ ID NO: 452 - protein, 8 aa, Homo sapiens
GYNVNDEK

SEQ ID NO: 453 - protein, 8 aa, Homo sapiens
GYNVNDEK

SEQ ID NO: 454 - protein, 21 aa, Homo sapiens
SDGAPASDSKPGSSEAAPSSK

SEQ ID NO: 455 - protein, 21 aa, Homo sapiens
SDGAPASDSKPGSSEAAPSSK

SEQ ID NO: 456 - protein, 21 aa, Homo sapiens
SDGAPASDSKPGSSEAAPSSK

SEQ ID NO: 457 - protein, 21 aa, Homo sapiens
SDGAPASDSKPGSSEAAPSSK

SEQ ID NO: 458 - protein, 13 aa, Homo sapiens
TEAPAAPAAQETK

SEQ ID NO: 459 - protein, 13 aa, Homo sapiens
TEAPAAPAAQETK

SEQ ID NO: 460 - protein, 13 aa, Homo sapiens
TEAPAAPAAQETK

SEQ ID NO: 461 - protein, 13 aa, Homo sapiens
TEAPAAPAAQETK

SEQ ID NO: 462 - protein, 13 aa, Homo sapiens
TGALLLQGFIQDR

SEQ ID NO: 463 - protein, 13 aa, Homo sapiens
TGALLLQGFIQDR

SEQ ID NO: 464 - protein, 13 aa, Homo sapiens
TGALLLQGFIQDR

SEQ ID NO: 465 - protein, 13 aa, Homo sapiens
TGALLLQGFIQDR

SEQ ID NO: 466 - protein, 6 aa, Homo sapiens
VPELIR

SEQ ID NO: 467 - protein, 6 aa, Homo sapiens
VPELIR

SEQ ID NO: 468 - protein, 6 aa, Homo sapiens
VPELIR

SEQ ID NO: 469 - protein, 6 aa, Homo sapiens
VPELIR

SEQ ID NO: 470 - protein, 10 aa, Homo sapiens
VVALFYFASK

SEQ ID NO: 471 - protein, 10 aa, Homo sapiens
VVALFYFASK

SEQ ID NO: 472 - protein, 10 aa, Homo sapiens
VVALFYFASK

SEQ ID NO: 473 - protein, 10 aa, Homo sapiens
VVALFYFASK

SEQ ID NO: 474 - protein, 8 aa, Homo sapiens
DADLYTSR

SEQ ID NO: 475 - protein, 8 aa, Homo sapiens
DADLYTSR

SEQ ID NO: 476 - protein, 8 aa, Homo sapiens
DADLYTSR

SEQ ID NO: 477 - protein, 8 aa, Homo sapiens
DADLYTSR

SEQ ID NO: 478 - protein, 22 aa, Homo sapiens
GLTSLADTFEHVIEELLDEDQK

SEQ ID NO: 479 - protein, 11 aa, Homo sapiens
GQGGLAYPGVR

SEQ ID NO: 480 - protein, 7 aa, Homo sapiens
QYFYETK

SEQ ID NO: 481 - protein, 7 aa, Homo sapiens
QYFYETK

SEQ ID NO: 482 - protein, 7 aa, Homo sapiens
QYFYETK

SEQ ID NO: 483 - protein, 7 aa, Homo sapiens
QYFYETK

SEQ ID NO: 484 - protein, 12 aa, Homo sapiens
THGTLESVNGPK

SEQ ID NO: 485 - protein, 12 aa, Homo sapiens
THGTLESVNGPK

SEQ ID NO: 486 - protein, 12 aa, Homo sapiens
THGTLESVNGPK

SEQ ID NO: 487 - protein, 12 aa, Homo sapiens
THGTLESVNGPK

SEQ ID NO: 488 - protein, 15 aa, Homo sapiens
ADHHATNGVVHLIDK

SEQ ID NO: 489 - protein, 15 aa, Homo sapiens
ADHHATNGVVHLIDK

SEQ ID NO: 490 - protein, 15 aa, Homo sapiens
ADHHATNGVVHLIDK

SEQ ID NO: 491 - protein, 15 aa, Homo sapiens
ADHHATNGVVHLIDK

SEQ ID NO: 492 - protein, 22 aa, Homo sapiens
DILATNGVIHYIDELLIPDSAK

SEQ ID NO: 493 - protein, 22 aa, Homo sapiens
DILATNGVIHYIDELLIPDSAK

SEQ ID NO: 494 - protein, 22 aa, Homo sapiens
DILATNGVIHYIDELLIPDSAK

SEQ ID NO: 495 - protein, 22 aa, Homo sapiens
DILATNGVIHYIDELLIPDSAK

SEQ ID NO: 496 - protein, 15 aa, Homo sapiens
EGVYTVFAPTNEAFR

SEQ ID NO: 497 - protein, 12 aa, Homo sapiens
LTLLAPLNSVFK

SEQ ID NO: 498 - protein, 12 aa, Homo sapiens
LTLLAPLNSVFK

SEQ ID NO: 499 - protein, 12 aa, Homo sapiens
LTLLAPLNSVFK

SEQ ID NO: 500 - protein, 12 aa, Homo sapiens
LTLLAPLNSVFK

SEQ ID NO: 501 - protein, 11 aa, Homo sapiens
SPYQLVLQHSR

SEQ ID NO: 502 - protein, 11 aa, Homo sapiens
SPYQLVLQHSR

SEQ ID NO: 503 - protein, 11 aa, Homo sapiens
SPYQLVLQHSR

SEQ ID NO: 504 - protein, 11 aa, Homo sapiens
SPYQLVLQHSR

SEQ ID NO: 505 - protein, 15 aa, Homo sapiens
INIYEIIKPATANSK

SEQ ID NO: 506 - protein, 15 aa, Homo sapiens
INIYEIIKPATANSK

SEQ ID NO: 507 - protein, 15 aa, Homo sapiens
INIYEIIKPATANSK

SEQ ID NO: 508 - protein, 15 aa, Homo sapiens
INIYEIIKPATANSK

SEQ ID NO: 509 - protein, 8 aa, Homo sapiens
LVNQNASR

SEQ ID NO: 510 - protein, 8 aa, Homo sapiens
LVNQNASR

SEQ ID NO: 511 - protein, 8 aa, Homo sapiens
LVNQNASR

SEQ ID NO: 512 - protein, 8 aa, Homo sapiens
LVNQNASR

SEQ ID NO: 513 - protein, 17 aa, Homo sapiens
SFHHEESLEELPETSGK

SEQ ID NO: 514 - protein, 17 aa, Homo sapiens
SFHHEESLEELPETSGK

SEQ ID NO: 515 - protein, 17 aa, Homo sapiens
SFHHEESLEELPETSGK

SEQ ID NO: 516 - protein, 17 aa, Homo sapiens
SFHHEESLEELPETSGK

SEQ ID NO: 517 - protein, 24 aa, Homo sapiens
SLHQDEHSWSQIRPLLVTFGHDGK

SEQ ID NO: 518 - protein, 21 aa, Homo sapiens
WTAQGHANHGFVVEVAHLEEK

SEQ ID NO: 519 - protein, 14 aa, Homo sapiens
AGLIIPLFLVLASR

SEQ ID NO: 520 - protein, 8 aa, Homo sapiens
ALLSPEQR

SEQ ID NO: 521 - protein, 6 aa, Homo sapiens
DIFLGR

SEQ ID NO: 522 - protein, 9 aa, Homo sapiens
GEGTSAHLR

SEQ ID NO: 523 - protein, 9 aa, Homo sapiens
GEGTSAHLR

SEQ ID NO: 524 - protein, 9 aa, Homo sapiens
GEGTSAHLR

SEQ ID NO: 525 - protein, 9 aa, Homo sapiens
GEGTSAHLR

SEQ ID NO: 526 - protein, 13 aa, Homo sapiens
GFFADYEIPNLQK

SEQ ID NO: 527 - protein, 13 aa, Homo sapiens
GFFADYEIPNLQK

SEQ ID NO: 528 - protein, 13 aa, Homo sapiens
GFFADYEIPNLQK

SEQ ID NO: 529 - protein, 13 aa, Homo sapiens
GFFADYEIPNLQK

SEQ ID NO: 530 - protein, 17 aa, Homo sapiens
EAEFGQGTGPIWLNEVK

SEQ ID NO: 531 - protein, 17 aa, Homo sapiens
EAEFGQGTGPIWLNEVK

SEQ ID NO: 532 - protein, 17 aa, Homo sapiens
EAEFGQGTGPIWLNEVK

SEQ ID NO: 533 - protein, 17 aa, Homo sapiens
EAEFGQGTGPIWLNEVK

SEQ ID NO: 534 - protein, 11 aa, Homo sapiens
GENLVHQIQYR

SEQ ID NO: 535 - protein, 11 aa, Homo sapiens
GENLVHQIQYR

SEQ ID NO: 536 - protein, 11 aa, Homo sapiens
GENLVHQIQYR

SEQ ID NO: 537 - protein, 11 aa, Homo sapiens
GENLVHQIQYR

SEQ ID NO: 538 - protein, 8 aa, Homo sapiens
INPASLDK

SEQ ID NO: 539 - protein, 8 aa, Homo sapiens
INPASLDK

SEQ ID NO: 540 - protein, 8 aa, Homo sapiens
INPASLDK

SEQ ID NO: 541 - protein, 8 aa, Homo sapiens
INPASLDK

SEQ ID NO: 542 - protein, 14 aa, Homo sapiens
LEVFYNGAWGTVGK

SEQ ID NO: 543 - protein, 14 aa, Homo sapiens
LEVFYNGAWGTVGK

SEQ ID NO: 544 - protein, 14 aa, Homo sapiens
LEVFYNGAWGTVGK

SEQ ID NO: 545 - protein, 14 aa, Homo sapiens
LEVFYNGAWGTVGK

SEQ ID NO: 546 - protein, 8 aa, Homo sapiens
TSYQVYSK

SEQ ID NO: 547 - protein, 8 aa, Homo sapiens
TSYQVYSK

SEQ ID NO: 548 - protein, 8 aa, Homo sapiens
TSYQVYSK

SEQ ID NO: 549 - protein, 8 aa, Homo sapiens
TSYQVYSK

SEQ ID NO: 550 - protein, 11 aa, Homo sapiens
EDVYVVGTVLR

SEQ ID NO: 551 - protein, 9 aa, Homo sapiens
GYILVGQAK

SEQ ID NO: 552 - protein, 9 aa, Homo sapiens
GYILVGQAK

SEQ ID NO: 553 - protein, 9 aa, Homo sapiens
GYILVGQAK

SEQ ID NO: 554 - protein, 9 aa, Homo sapiens
GYILVGQAK

SEQ ID NO: 555 - protein, 7 aa, Homo sapiens
IAHGHYK

SEQ ID NO: 556 - protein, 7 aa, Homo sapiens
IAHGHYK

SEQ ID NO: 557 - protein, 7 aa, Homo sapiens
IAHGHYK

SEQ ID NO: 558 - protein, 7 aa, Homo sapiens
IAHGHYK

SEQ ID NO: 559 - protein, 12 aa, Homo sapiens
LSLEIEQLELQR

SEQ ID NO: 560 - protein, 12 aa, Homo sapiens
LSLEIEQLELQR

SEQ ID NO: 561 - protein, 12 aa, Homo sapiens
LSLEIEQLELQR

SEQ ID NO: 562 - protein, 12 aa, Homo sapiens
LSLEIEQLELQR

SEQ ID NO: 563 - protein, 8 aa, Homo sapiens
TWYPEVPK

SEQ ID NO: 564 - protein, 8 aa, Homo sapiens
TWYPEVPK

SEQ ID NO: 565 - protein, 8 aa, Homo sapiens
TWYPEVPK

SEQ ID NO: 566 - protein, 8 aa, Homo sapiens
TWYPEVPK

SEQ ID NO: 567 - protein, 16 aa, Homo sapiens
FPAEIHVVHLSTAFAR

SEQ ID NO: 568 - protein, 16 aa, Homo sapiens
FPAEIHVVHLSTAFAR

SEQ ID NO: 569 - protein, 16 aa, Homo sapiens
FPAEIHVVHLSTAFAR

SEQ ID NO: 570 - protein, 16 aa, Homo sapiens
FPAEIHVVHLSTAFAR

SEQ ID NO: 571 - protein, 15 aa, Homo sapiens
GGVSYRPAEVAETGA

SEQ ID NO: 572 - protein, 28 aa, Homo sapiens
LEEIAEEGSETQVPGLDISALLPSDFSR

SEQ ID NO: 573 - protein, 28 aa, Homo sapiens
LEEIAEEGSETQVPGLDISALLPSDFSR

SEQ ID NO: 574 - protein, 28 aa, Homo sapiens
LEEIAEEGSETQVPGLDISALLPSDFSR

SEQ ID NO: 575 - protein, 28 aa, Homo sapiens
LEEIAEEGSETQVPGLDISALLPSDFSR

SEQ ID NO: 576 - protein, 15 aa, Homo sapiens
VIEASFPAGVDSSPR

SEQ ID NO: 577 - protein, 15 aa, Homo sapiens
VIEASFPAGVDSSPR

SEQ ID NO: 578 - protein, 15 aa, Homo sapiens
VIEASFPAGVDSSPR

SEQ ID NO: 579 - protein, 15 aa, Homo sapiens
VIEASFPAGVDSSPR

SEQ ID NO: 580 - protein, 9 aa, Homo sapiens
YGGDPPWPR

SEQ ID NO: 581 - protein, 9 aa, Homo sapiens
YGGDPPWPR

SEQ ID NO: 582 - protein, 9 aa, Homo sapiens
YGGDPPWPR

SEQ ID NO: 583 - protein, 9 aa, Homo sapiens
YGGDPPWPR

SEQ ID NO: 584 - protein, 21 aa, Homo sapiens
DDEFTHLYTLIVRPDNTYEVK

SEQ ID NO: 585 - protein, 13 aa, Homo sapiens
DPDASKPEDWDER

SEQ ID NO: 586 - protein, 13 aa, Homo sapiens
DPDASKPEDWDER

SEQ ID NO: 587 - protein, 13 aa, Homo sapiens
DPDASKPEDWDER

SEQ ID NO: 588 - protein, 13 aa, Homo sapiens
DPDASKPEDWDER

SEQ ID NO: 589 - protein, 7 aa, Homo sapiens
FYGDEEK

SEQ ID NO: 590 - protein, 7 aa, Homo sapiens
FYGDEEK

SEQ ID NO: 591 - protein, 7 aa, Homo sapiens
FYGDEEK

SEQ ID NO: 592 - protein, 7 aa, Homo sapiens
FYGDEEK

SEQ ID NO: 593 - protein, 9 aa, Homo sapiens
GLQTSQDAR

SEQ ID NO: 594 - protein, 11 aa, Homo sapiens
GQTLVVQFTVK

SEQ ID NO: 595 - protein, 16 aa, Homo sapiens
DWILPSDYDHAEAEAR

SEQ ID NO: 596 - protein, 7 aa, Homo sapiens
EQFVEFR

SEQ ID NO: 597 - protein, 7 aa, Homo sapiens
EQFVEFR

SEQ ID NO: 598 - protein, 7 aa, Homo sapiens
EQFVEFR

SEQ ID NO: 599 - protein, 7 aa, Homo sapiens
EQFVEFR

SEQ ID NO: 600 - protein, 16 aa, Homo sapiens
GHDLNEDGLVSWEEYK

SEQ ID NO: 601 - protein, 16 aa, Homo sapiens
GHDLNEDGLVSWEEYK

SEQ ID NO: 602 - protein, 16 aa, Homo sapiens
GHDLNEDGLVSWEEYK

SEQ ID NO: 603 - protein, 16 aa, Homo sapiens
GHDLNEDGLVSWEEYK

SEQ ID NO: 604 - protein, 11 aa, Homo sapiens
TFDQLTPEESK

SEQ ID NO: 605 - protein, 11 aa, Homo sapiens
TFDQLTPEESK

SEQ ID NO: 606 - protein, 11 aa, Homo sapiens
TFDQLTPEESK

SEQ ID NO: 607 - protein, 11 aa, Homo sapiens
TFDQLTPEESK

SEQ ID NO: 608 - protein, 22 aa, Homo sapiens
VHNDAQSFDYDHDAFLGAEEAK

SEQ ID NO: 609 - protein, 9 aa, Homo sapiens
AEEDEILNR

SEQ ID NO: 610 - protein, 9 aa, Homo sapiens
AEEDEILNR

SEQ ID NO: 611 - protein, 9 aa, Homo sapiens
AEEDEILNR

SEQ ID NO: 612 - protein, 9 aa, Homo sapiens
AEEDEILNR

SEQ ID NO: 613 - protein, 16 aa, Homo sapiens
APVPTGEVYFADSFDR

SEQ ID NO: 614 - protein, 16 aa, Homo sapiens
APVPTGEVYFADSFDR

SEQ ID NO: 615 - protein, 16 aa, Homo sapiens
APVPTGEVYFADSFDR

SEQ ID NO: 616 - protein, 16 aa, Homo sapiens
APVPTGEVYFADSFDR

SEQ ID NO: 617 - protein, 10 aa, Homo sapiens
GTLSGWILSK

SEQ ID NO: 618 - protein, 10 aa, Homo sapiens
GTLSGWILSK

SEQ ID NO: 619 - protein, 10 aa, Homo sapiens
GTLSGWILSK

SEQ ID NO: 620 - protein, 10 aa, Homo sapiens
GTLSGWILSK

SEQ ID NO: 621 - protein, 19 aa, Homo sapiens
IPDPEAVKPDDWDEDAPAK

SEQ ID NO: 622 - protein, 19 aa, Homo sapiens
IPDPEAVKPDDWDEDAPAK

SEQ ID NO: 623 - protein, 19 aa, Homo sapiens
IPDPEAVKPDDWDEDAPAK

SEQ ID NO: 624 - protein, 19 aa, Homo sapiens
IPDPEAVKPDDWDEDAPAK

SEQ ID NO: 625 - protein, 7 aa, Homo sapiens
TGIYEEK

SEQ ID NO: 626 - protein, 7 aa, Homo sapiens
TGIYEEK

SEQ ID NO: 627 - protein, 7 aa, Homo sapiens
TGIYEEK

SEQ ID NO: 628 - protein, 7 aa, Homo sapiens
TGIYEEK

SEQ ID NO: 629 - protein, 15 aa, Homo sapiens
DWIDGVLNNPGPGPA

SEQ ID NO: 630 - protein, 15 aa, Homo sapiens
DWIDGVLNNPGPGPA

SEQ ID NO: 631 - protein, 15 aa, Homo sapiens
DWIDGVLNNPGPGPA

SEQ ID NO: 632 - protein, 15 aa, Homo sapiens
DWIDGVLNNPGPGPA

SEQ ID NO: 633 - protein, 25 aa, Homo sapiens
EANLTSSVTILPLPLQNATVEAGTR

SEQ ID NO: 634 - protein, 7 aa, Homo sapiens
GPDFFTR

SEQ ID NO: 635 - protein, 15 aa, Homo sapiens
LTVLALLAGLLASSR

SEQ ID NO: 636 - protein, 13 aa, Homo sapiens
QFPFLASIQNQGR

SEQ ID NO: 637 - protein, 13 aa, Homo sapiens
QFPFLASIQNQGR

SEQ ID NO: 638 - protein, 13 aa, Homo sapiens
QFPFLASIQNQGR

SEQ ID NO: 639 - protein, 13 aa, Homo sapiens
QFPFLASIQNQGR

SEQ ID NO: 640 - protein, 14 aa, Homo sapiens
HYGYNSYSVSNSEK

SEQ ID NO: 641 - protein, 14 aa, Homo sapiens
HYGYNSYSVSNSEK

SEQ ID NO: 642 - protein, 14 aa, Homo sapiens
HYGYNSYSVSNSEK

SEQ ID NO: 643 - protein, 14 aa, Homo sapiens
HYGYNSYSVSNSEK

SEQ ID NO: 644 - protein, 30 aa, Homo sapiens
ILGWGVENGTPYWLVANSWNTDWGDNGFFK

SEQ ID NO: 645 - protein, 8 aa, Homo sapiens
LPASFDAR

SEQ ID NO: 646 - protein, 8 aa, Homo sapiens
LPASFDAR

SEQ ID NO: 647 - protein, 8 aa, Homo sapiens
LPASFDAR

SEQ ID NO: 648 - protein, 8 aa, Homo sapiens
LPASFDAR

SEQ ID NO: 649 - protein, 18 aa, Homo sapiens
NGPVEGAFSVYSDFLLYK

SEQ ID NO: 650 - protein, 7 aa, Homo sapiens
TDQYWEK

SEQ ID NO: 651 - protein, 7 aa, Homo sapiens
TDQYWEK

SEQ ID NO: 652 - protein, 7 aa, Homo sapiens
TDQYWEK

SEQ ID NO: 653 - protein, 7 aa, Homo sapiens
TDQYWEK

SEQ ID NO: 654 - protein, 7 aa, Homo sapiens
HPQYNQR

SEQ ID NO: 655 - protein, 7 aa, Homo sapiens
HPQYNQR

SEQ ID NO: 656 - protein, 7 aa, Homo sapiens
HPQYNQR

SEQ ID NO: 657 - protein, 7 aa, Homo sapiens
HPQYNQR

SEQ ID NO: 658 - protein, 9 aa, Homo sapiens
NVNPVALPR

SEQ ID NO: 659 - protein, 9 aa, Homo sapiens
NVNPVALPR

SEQ ID NO: 660 - protein, 9 aa, Homo sapiens
NVNPVALPR

SEQ ID NO: 661 - protein, 9 aa, Homo sapiens
NVNPVALPR

SEQ ID NO: 662 - protein, 11 aa, Homo sapiens
SSGVPPEVFTR

SEQ ID NO: 663 - protein, 11 aa, Homo sapiens
SSGVPPEVFTR

SEQ ID NO: 664 - protein, 11 aa, Homo sapiens
SSGVPPEVFTR

SEQ ID NO: 665 - protein, 11 aa, Homo sapiens
SSGVPPEVFTR

SEQ ID NO: 666 - protein, 9 aa, Homo sapiens
VSSFLPWIR

SEQ ID NO: 667 - protein, 9 aa, Homo sapiens
VSSFLPWIR

SEQ ID NO: 668 - protein, 9 aa, Homo sapiens
VSSFLPWIR

SEQ ID NO: 669 - protein, 9 aa, Homo sapiens
VSSFLPWIR

SEQ ID NO: 670 - protein, 25 aa, Homo sapiens
ASASYYEQYHSLNEIYSWIEFITER

SEQ ID NO: 671 - protein, 25 aa, Homo sapiens
ASASYYEQYHSLNEIYSWIEFITER

SEQ ID NO: 672 - protein, 25 aa, Homo sapiens
ASASYYEQYHSLNEIYSWIEFITER

SEQ ID NO: 673 - protein, 25 aa, Homo sapiens
ASASYYEQYHSLNEIYSWIEFITER

SEQ ID NO: 674 - protein, 20 aa, Homo sapiens
AYISMHSYSQHIVFPYSYTR

SEQ ID NO: 675 - protein, 20 aa, Homo sapiens
AYISMHSYSQHIVFPYSYTR

SEQ ID NO: 676 - protein, 20 aa, Homo sapiens
AYISMHSYSQHIVFPYSYTR

SEQ ID NO: 677 - protein, 20 aa, Homo sapiens
AYISMHSYSQHIVFPYSYTR

SEQ ID NO: 678 - protein, 14 aa, Homo sapiens
DHEELSLVASEAVR

SEQ ID NO: 679 - protein, 14 aa, Homo sapiens
DHEELSLVASEAVR

SEQ ID NO: 680 - protein, 14 aa, Homo sapiens
DHEELSLVASEAVR

SEQ ID NO: 681 - protein, 14 aa, Homo sapiens
DHEELSLVASEAVR

SEQ ID NO: 682 - protein, 12 aa, Homo sapiens
DTGTYGFLLPER

SEQ ID NO: 683 - protein, 12 aa, Homo sapiens
DTGTYGFLLPER

SEQ ID NO: 684 - protein, 12 aa, Homo sapiens
DTGTYGFLLPER

SEQ ID NO: 685 - protein, 12 aa, Homo sapiens
DTGTYGFLLPER

SEQ ID NO: 686 - protein, 8 aa, Homo sapiens
EAFAAVSK

SEQ ID NO: 687 - protein, 8 aa, Homo sapiens
EAFAAVSK

SEQ ID NO: 688 - protein, 8 aa, Homo sapiens
EAFAAVSK

SEQ ID NO: 689 - protein, 8 aa, Homo sapiens
EAFAAVSK

SEQ ID NO: 690 - protein, 9 aa, Homo sapiens
IHIGSSFEK

SEQ ID NO: 691 - protein, 9 aa, Homo sapiens
IHIGSSFEK

SEQ ID NO: 692 - protein, 9 aa, Homo sapiens
IHIGSSFEK

SEQ ID NO: 693 - protein, 9 aa, Homo sapiens
IHIGSSFEK

SEQ ID NO: 694 - protein, 20 aa, Homo sapiens
LVDFYVMPVVNVDGYDYSWK

SEQ ID NO: 695 - protein, 15 aa, Homo sapiens
QVHFFVNASDVDNVK

SEQ ID NO: 696 - protein, 15 aa, Homo sapiens
QVHFFVNASDVDNVK

SEQ ID NO: 697 - protein, 15 aa, Homo sapiens
QVHFFVNASDVDNVK

SEQ ID NO: 698 - protein, 15 aa, Homo sapiens
QVHFFVNASDVDNVK

SEQ ID NO: 699 - protein, 7 aa, Homo sapiens
YPLYVLK

SEQ ID NO: 700 - protein, 7 aa, Homo sapiens
YPLYVLK

SEQ ID NO: 701 - protein, 7 aa, Homo sapiens
YPLYVLK

SEQ ID NO: 702 - protein, 7 aa, Homo sapiens
YPLYVLK

SEQ ID NO: 703 - protein, 27 aa, Homo sapiens
YTHGHGSETLYLAPGGGDDWIYDLGIK

SEQ ID NO: 704 - protein, 19 aa, Homo sapiens
AFPALTSLDLSDNPGLGER

SEQ ID NO: 705 - protein, 19 aa, Homo sapiens
AFPALTSLDLSDNPGLGER

SEQ ID NO: 706 - protein, 19 aa, Homo sapiens
AFPALTSLDLSDNPGLGER

SEQ ID NO: 707 - protein, 19 aa, Homo sapiens
AFPALTSLDLSDNPGLGER

SEQ ID NO: 708 - protein, 9 aa, Homo sapiens
ATVNPSAPR

SEQ ID NO: 709 - protein, 9 aa, Homo sapiens
ATVNPSAPR

SEQ ID NO: 710 - protein, 9 aa, Homo sapiens
ATVNPSAPR

SEQ ID NO: 711 - protein, 9 aa, Homo sapiens
ATVNPSAPR

SEQ ID NO: 712 - protein, 8 aa, Homo sapiens
ELTLEDLK

SEQ ID NO: 713 - protein, 8 aa, Homo sapiens
ELTLEDLK

SEQ ID NO: 714 - protein, 8 aa, Homo sapiens
ELTLEDLK

SEQ ID NO: 715 - protein, 8 aa, Homo sapiens
ELTLEDLK

SEQ ID NO: 716 - protein, 10 aa, Homo sapiens
FPAIQNLALR

SEQ ID NO: 717 - protein, 10 aa, Homo sapiens
FPAIQNLALR

SEQ ID NO: 718 - protein, 10 aa, Homo sapiens
FPAIQNLALR

SEQ ID NO: 719 - protein, 10 aa, Homo sapiens
FPAIQNLALR

SEQ ID NO: 720 - protein, 21 aa, Homo sapiens
ITGTMPPLPLEATGLALSSLR

SEQ ID NO: 721 - protein, 18 aa, Homo sapiens
LTVGAAQVPAQLLVGALR

SEQ ID NO: 722 - protein, 18 aa, Homo sapiens
LTVGAAQVPAQLLVGALR

SEQ ID NO: 723 - protein, 18 aa, Homo sapiens
LTVGAAQVPAQLLVGALR

SEQ ID NO: 724 - protein, 18 aa, Homo sapiens
LTVGAAQVPAQLLVGALR

SEQ ID NO: 725 - protein, 8 aa, Homo sapiens
NVSWATGR

SEQ ID NO: 726 - protein, 8 aa, Homo sapiens
NVSWATGR

SEQ ID NO: 727 - protein, 8 aa, Homo sapiens
NVSWATGR

SEQ ID NO: 728 - protein, 8 aa, Homo sapiens
NVSWATGR

SEQ ID NO: 729 - protein, 18 aa, Homo sapiens
STLSVGVSGTLVLLQGAR

SEQ ID NO: 730 - protein, 18 aa, Homo sapiens
STLSVGVSGTLVLLQGAR

SEQ ID NO: 731 - protein, 18 aa, Homo sapiens
STLSVGVSGTLVLLQGAR

SEQ ID NO: 732 - protein, 18 aa, Homo sapiens
STLSVGVSGTLVLLQGAR

SEQ ID NO: 733 - protein, 15 aa, Homo sapiens
SWLAELQQWLKPGLK

SEQ ID NO: 734 - protein, 15 aa, Homo sapiens
SWLAELQQWLKPGLK

SEQ ID NO: 735 - protein, 15 aa, Homo sapiens
SWLAELQQWLKPGLK

SEQ ID NO: 736 - protein, 15 aa, Homo sapiens
SWLAELQQWLKPGLK

SEQ ID NO: 737 - protein, 8 aa, Homo sapiens
VDADADPR

SEQ ID NO: 738 - protein, 8 aa, Homo sapiens
VDADADPR

SEQ ID NO: 739 - protein, 8 aa, Homo sapiens
VDADADPR

SEQ ID NO: 740 - protein, 8 aa, Homo sapiens
VDADADPR

SEQ ID NO: 741 - protein, 24 aa, Homo sapiens
AAGGALQSTASLFVVSLSLLHLYS

SEQ ID NO: 742 - protein, 6 aa, Homo sapiens
HSHPTR

SEQ ID NO: 743 - protein, 6 aa, Homo sapiens
HSHPTR

SEQ ID NO: 744 - protein, 6 aa, Homo sapiens
HSHPTR

SEQ ID NO: 745 - protein, 8 aa, Homo sapiens
VFVVHIPR

SEQ ID NO: 746 - protein, 8 aa, Homo sapiens
VFVVHIPR

SEQ ID NO: 747 - protein, 8 aa, Homo sapiens
VFVVHIPR

SEQ ID NO: 748 - protein, 8 aa, Homo sapiens
VFVVHIPR

SEQ ID NO: 749 - protein, 11 aa, Homo sapiens
DLAHQFTQVQR

SEQ ID NO: 750 - protein, 6 aa, Homo sapiens
ILLWSR

SEQ ID NO: 751 - protein, 6 aa, Homo sapiens
ILLWSR

SEQ ID NO: 752 - protein, 6 aa, Homo sapiens
ILLWSR

SEQ ID NO: 753 - protein, 6 aa, Homo sapiens
ILLWSR

SEQ ID NO: 754 - protein, 7 aa, Homo sapiens
NIYRPDK

SEQ ID NO: 755 - protein, 7 aa, Homo sapiens
NIYRPDK

SEQ ID NO: 756 - protein, 7 aa, Homo sapiens
NIYRPDK

SEQ ID NO: 757 - protein, 7 aa, Homo sapiens
NIYRPDK

SEQ ID NO: 758 - protein, 16 aa, Homo sapiens
NSTFGSVEVHNLQPEK

SEQ ID NO: 759 - protein, 16 aa, Homo sapiens
NSTFGSVEVHNLQPEK

SEQ ID NO: 760 - protein, 16 aa, Homo sapiens
NSTFGSVEVHNLQPEK

SEQ ID NO: 761 - protein, 16 aa, Homo sapiens
NSTFGSVEVHNLQPEK

SEQ ID NO: 762 - protein, 13 aa, Homo sapiens
VQTLEAWVIHGGR

SEQ ID NO: 763 - protein, 13 aa, Homo sapiens
VQTLEAWVIHGGR

SEQ ID NO: 764 - protein, 13 aa, Homo sapiens
VQTLEAWVIHGGR

SEQ ID NO: 765 - protein, 13 aa, Homo sapiens
VQTLEAWVIHGGR

SEQ ID NO: 766 - protein, 18 aa, Homo sapiens
GDQNPQIAAHVISEASSK

SEQ ID NO: 767 - protein, 18 aa, Homo sapiens
GDQNPQIAAHVISEASSK

SEQ ID NO: 768 - protein, 18 aa, Homo sapiens
GDQNPQIAAHVISEASSK

SEQ ID NO: 769 - protein, 18 aa, Homo sapiens
GDQNPQIAAHVISEASSK

SEQ ID NO: 770 - protein, 8 aa, Homo sapiens
SQFEGFVK

SEQ ID NO: 771 - protein, 10 aa, Homo sapiens
TTSVLQWAEK

SEQ ID NO: 772 - protein, 10 aa, Homo sapiens
TTSVLQWAEK

SEQ ID NO: 773 - protein, 10 aa, Homo sapiens
TTSVLQWAEK

SEQ ID NO: 774 - protein, 10 aa, Homo sapiens
TTSVLQWAEK

SEQ ID NO: 775 - protein, 9 aa, Homo sapiens
FAGVFHVEK

SEQ ID NO: 776 - protein, 9 aa, Homo sapiens
FAGVFHVEK

SEQ ID NO: 777 - protein, 9 aa, Homo sapiens
FAGVFHVEK

SEQ ID NO: 778 - protein, 25 aa, Homo sapiens
HLSFSGSGIDDDEDFISSTISTTPR

SEQ ID NO: 779 - protein, 11 aa, Homo sapiens
KPSGLNGEASK

SEQ ID NO: 780 - protein, 11 aa, Homo sapiens
KPSGLNGEASK

SEQ ID NO: 781 - protein, 11 aa, Homo sapiens
KPSGLNGEASK

SEQ ID NO: 782 - protein, 11 aa, Homo sapiens
KPSGLNGEASK

SEQ ID NO: 783 - protein, 24 aa, Homo sapiens
TNPEDIYPSNPTDDDVSSGSSSER

SEQ ID NO: 784 - protein, 12 aa, Homo sapiens
YGFIEGHVVIPR

SEQ ID NO: 785 - protein, 12 aa, Homo sapiens
YGFIEGHVVIPR

SEQ ID NO: 786 - protein, 12 aa, Homo sapiens
YGFIEGHVVIPR

SEQ ID NO: 787 - protein, 12 aa, Homo sapiens
YGFIEGHVVIPR

SEQ ID NO: 788 - protein, 8 aa, Homo sapiens
AGLQVYNK

SEQ ID NO: 789 - protein, 8 aa, Homo sapiens
AGLQVYNK

SEQ ID NO: 790 - protein, 8 aa, Homo sapiens
AGLQVYNK

SEQ ID NO: 791 - protein, 8 aa, Homo sapiens
AGLQVYNK

SEQ ID NO: 792 - protein, 18 aa, Homo sapiens
TVLLLVTPFLAAAWSLHP

SEQ ID NO: 793 - protein, 18 aa, Homo sapiens
TVLLLVTPFLAAAWSLHP

SEQ ID NO: 794 - protein, 18 aa, Homo sapiens
TVLLLVTPFLAAAWSLHP

SEQ ID NO: 795 - protein, 18 aa, Homo sapiens
TVLLLVTPFLAAAWSLHP

SEQ ID NO: 796 - protein, 22 aa, Homo sapiens
ELNSPILFAFSHLESSDGEAGR

SEQ ID NO: 797 - protein, 7 aa, Homo sapiens
FIPEDPK

SEQ ID NO: 798 - protein, 13 aa, Homo sapiens
TSSAEVTIQNVIK

SEQ ID NO: 799 - protein, 13 aa, Homo sapiens
TSSAEVTIQNVIK

SEQ ID NO: 800 - protein, 13 aa, Homo sapiens
TSSAEVTIQNVIK

SEQ ID NO: 801 - protein, 13 aa, Homo sapiens
TSSAEVTIQNVIK

SEQ ID NO: 802 - protein, 10 aa, Homo sapiens
VFQGQGLSTR

SEQ ID NO: 803 - protein, 10 aa, Homo sapiens
VFQGQGLSTR

SEQ ID NO: 804 - protein, 10 aa, Homo sapiens
VFQGQGLSTR

SEQ ID NO: 805 - protein, 10 aa, Homo sapiens
VFQGQGLSTR

SEQ ID NO: 806 - protein, 17 aa, Homo sapiens
YSEFTSTTSGTGHNQTR

SEQ ID NO: 807 - protein, 17 aa, Homo sapiens
YSEFTSTTSGTGHNQTR

SEQ ID NO: 808 - protein, 17 aa, Homo sapiens
YSEFTSTTSGTGHNQTR

SEQ ID NO: 809 - protein, 17 aa, Homo sapiens
YSEFTSTTSGTGHNQTR

SEQ ID NO: 810 - protein, 12 aa, Homo sapiens
EEGVFTVTPDTK

SEQ ID NO: 811 - protein, 12 aa, Homo sapiens
EEGVFTVTPDTK

SEQ ID NO: 812 - protein, 12 aa, Homo sapiens
EEGVFTVTPDTK

SEQ ID NO: 813 - protein, 12 aa, Homo sapiens
EEGVFTVTPDTK

SEQ ID NO: 814 - protein, 10 aa, Homo sapiens
IYVVDLSNER

SEQ ID NO: 815 - protein, 10 aa, Homo sapiens
IYVVDLSNER

SEQ ID NO: 816 - protein, 10 aa, Homo sapiens
IYVVDLSNER

SEQ ID NO: 817 - protein, 10 aa, Homo sapiens
IYVVDLSNER

SEQ ID NO: 818 - protein, 10 aa, Homo sapiens
LSLVLVPAQK

SEQ ID NO: 819 - protein, 10 aa, Homo sapiens
LSLVLVPAQK

SEQ ID NO: 820 - protein, 10 aa, Homo sapiens
LSLVLVPAQK

SEQ ID NO: 821 - protein, 10 aa, Homo sapiens
LSLVLVPAQK

SEQ ID NO: 822 - protein, 23 aa, Homo sapiens
SPPESESEPYTFSHPNNGDVSSK

SEQ ID NO: 823 - protein, 16 aa, Homo sapiens
VEYYIPGSTTNPEVFK

SEQ ID NO: 824 - protein, 16 aa, Homo sapiens
VEYYIPGSTTNPEVFK

SEQ ID NO: 825 - protein, 16 aa, Homo sapiens
VEYYIPGSTTNPEVFK

SEQ ID NO: 826 - protein, 16 aa, Homo sapiens
VEYYIPGSTTNPEVFK

SEQ ID NO: 827 - protein, 12 aa, Homo sapiens
APPPGLPAETIK

SEQ ID NO: 828 - protein, 12 aa, Homo sapiens
APPPGLPAETIK

SEQ ID NO: 829 - protein, 12 aa, Homo sapiens
APPPGLPAETIK

SEQ ID NO: 830 - protein, 12 aa, Homo sapiens
APPPGLPAETIK

SEQ ID NO: 831 - protein, 16 aa, Homo sapiens
DLKPENILVTSGGTVK

SEQ ID NO: 832 - protein, 15 aa, Homo sapiens
IFDLIGLPPEDDWPR

SEQ ID NO: 833 - protein, 15 aa, Homo sapiens
IFDLIGLPPEDDWPR

SEQ ID NO: 834 - protein, 15 aa, Homo sapiens
IFDLIGLPPEDDWPR

SEQ ID NO: 835 - protein, 15 aa, Homo sapiens
IFDLIGLPPEDDWPR

SEQ ID NO: 836 - protein, 17 aa, Homo sapiens
VPNGGGGGGGLPISTVR

SEQ ID NO: 837 - protein, 17 aa, Homo sapiens
VPNGGGGGGGLPISTVR

SEQ ID NO: 838 - protein, 17 aa, Homo sapiens
VPNGGGGGGGLPISTVR

SEQ ID NO: 839 - protein, 17 aa, Homo sapiens
VPNGGGGGGGLPISTVR

SEQ ID NO: 840 - protein, 13 aa, Homo sapiens
VTLVFEHVDQDLR

SEQ ID NO: 841 - protein, 13 aa, Homo sapiens
VTLVFEHVDQDLR

SEQ ID NO: 842 - protein, 13 aa, Homo sapiens
VTLVFEHVDQDLR

SEQ ID NO: 843 - protein, 13 aa, Homo sapiens
VTLVFEHVDQDLR

SEQ ID NO: 844 - protein, 20 aa, Homo sapiens
EVLLLVHNLPQHLFGYSWYK

SEQ ID NO: 845 - protein, 20 aa, Homo sapiens
EVLLLVHNLPQHLFGYSWYK

SEQ ID NO: 846 - protein, 20 aa, Homo sapiens
EVLLLVHNLPQHLFGYSWYK

SEQ ID NO: 847 - protein, 20 aa, Homo sapiens
EVLLLVHNLPQHLFGYSWYK

SEQ ID NO: 848 - protein, 16 aa, Homo sapiens
INGIPQQHTQVLFIAK

SEQ ID NO: 849 - protein, 14 aa, Homo sapiens
LTIESTPFNVAEGK

SEQ ID NO: 850 - protein, 14 aa, Homo sapiens
LTIESTPFNVAEGK

SEQ ID NO: 851 - protein, 14 aa, Homo sapiens
LTIESTPFNVAEGK

SEQ ID NO: 852 - protein, 14 aa, Homo sapiens
LTIESTPFNVAEGK

SEQ ID NO: 853 - protein, 21 aa, Homo sapiens
QIIGYVIGTQQATPGPAYSGR

SEQ ID NO: 854 - protein, 21 aa, Homo sapiens
QIIGYVIGTQQATPGPAYSGR

SEQ ID NO: 855 - protein, 21 aa, Homo sapiens
QIIGYVIGTQQATPGPAYSGR

SEQ ID NO: 856 - protein, 21 aa, Homo sapiens
QIIGYVIGTQQATPGPAYSGR

SEQ ID NO: 857 - protein, 13 aa, Homo sapiens
SDLVNEEATGQFR

SEQ ID NO: 858 - protein, 13 aa, Homo sapiens
SDLVNEEATGQFR

SEQ ID NO: 859 - protein, 13 aa, Homo sapiens
SDLVNEEATGQFR

SEQ ID NO: 860 - protein, 13 aa, Homo sapiens
SDLVNEEATGQFR

SEQ ID NO: 861 - protein, 14 aa, Homo sapiens
EVLLLVHNLPQDPR

SEQ ID NO: 862 - protein, 6 aa, Homo sapiens
GYNWYK

SEQ ID NO: 863 - protein, 9 aa, Homo sapiens
LFIPNITTK

SEQ ID NO: 864 - protein, 9 aa, Homo sapiens
LFIPNITTK

SEQ ID NO: 865 - protein, 9 aa, Homo sapiens
LFIPNITTK

SEQ ID NO: 866 - protein, 9 aa, Homo sapiens
LFIPNITTK

SEQ ID NO: 867 - protein, 9 aa, Homo sapiens
TLTLLSVTR

SEQ ID NO: 868 - protein, 9 aa, Homo sapiens
TLTLLSVTR

SEQ ID NO: 869 - protein, 9 aa, Homo sapiens
TLTLLSVTR

SEQ ID NO: 870 - protein, 9 aa, Homo sapiens
TLTLLSVTR

SEQ ID NO: 871 - protein, 13 aa, Homo sapiens
GAYPLSIEPIGVR

SEQ ID NO: 872 - protein, 13 aa, Homo sapiens
GAYPLSIEPIGVR

SEQ ID NO: 873 - protein, 13 aa, Homo sapiens
GAYPLSIEPIGVR

SEQ ID NO: 874 - protein, 13 aa, Homo sapiens
GAYPLSIEPIGVR

SEQ ID NO: 875 - protein, 23 aa, Homo sapiens
GPEEEHLGILGPVIWAEVGDTIR

SEQ ID NO: 876 - protein, 23 aa, Homo sapiens
GPEEEHLGILGPVIWAEVGDTIR

SEQ ID NO: 877 - protein, 23 aa, Homo sapiens
GPEEEHLGILGPVIWAEVGDTIR

SEQ ID NO: 878 - protein, 23 aa, Homo sapiens
GPEEEHLGILGPVIWAEVGDTIR

SEQ ID NO: 879 - protein, 10 aa, Homo sapiens
IYHSHIDAPK

SEQ ID NO: 880 - protein, 10 aa, Homo sapiens
IYHSHIDAPK

SEQ ID NO: 881 - protein, 10 aa, Homo sapiens
IYHSHIDAPK

SEQ ID NO: 882 - protein, 10 aa, Homo sapiens
IYHSHIDAPK

SEQ ID NO: 883 - protein, 16 aa, Homo sapiens
NNEGTYYSPNYNPQSR

SEQ ID NO: 884 - protein, 16 aa, Homo sapiens
NNEGTYYSPNYNPQSR

SEQ ID NO: 885 - protein, 16 aa, Homo sapiens
NNEGTYYSPNYNPQSR

SEQ ID NO: 886 - protein, 16 aa, Homo sapiens
NNEGTYYSPNYNPQSR

SEQ ID NO: 887 - protein, 23 aa, Homo sapiens
SVPPSASHVAPTETFTYEWTVPK

SEQ ID NO: 888 - protein, 7 aa, Homo sapiens
DGDILGK

SEQ ID NO: 889 - protein, 7 aa, Homo sapiens
DGDILGK

SEQ ID NO: 890 - protein, 7 aa, Homo sapiens
DGDILGK

SEQ ID NO: 891 - protein, 7 aa, Homo sapiens
DGDILGK

SEQ ID NO: 892 - protein, 6 aa, Homo sapiens
DYFLFR

SEQ ID NO: 893 - protein, 6 aa, Homo sapiens
DYFLFR

SEQ ID NO: 894 - protein, 6 aa, Homo sapiens
DYFLFR

SEQ ID NO: 895 - protein, 6 aa, Homo sapiens
DYFLFR

SEQ ID NO: 896 - protein, 10 aa, Homo sapiens
GGEIQPVSVK

SEQ ID NO: 897 - protein, 10 aa, Homo sapiens
GGEIQPVSVK

SEQ ID NO: 898 - protein, 10 aa, Homo sapiens
GGEIQPVSVK

SEQ ID NO: 899 - protein, 10 aa, Homo sapiens
GGEIQPVSVK

SEQ ID NO: 900 - protein, 10 aa, Homo sapiens
VLLPEYGGTK

SEQ ID NO: 901 - protein, 10 aa, Homo sapiens
VLLPEYGGTK

SEQ ID NO: 902 - protein, 10 aa, Homo sapiens
VLLPEYGGTK

SEQ ID NO: 903 - protein, 10 aa, Homo sapiens
VLLPEYGGTK

SEQ ID NO: 904 - protein, 14 aa, Homo sapiens
VLQATVVAVGSGSK

SEQ ID NO: 905 - protein, 14 aa, Homo sapiens
VLQATVVAVGSGSK

SEQ ID NO: 906 - protein, 14 aa, Homo sapiens
VLQATVVAVGSGSK

SEQ ID NO: 907 - protein, 14 aa, Homo sapiens
VLQATVVAVGSGSK

SEQ ID NO: 908 - protein, 7 aa, Homo sapiens
GIIDPTK

SEQ ID NO: 909 - protein, 7 aa, Homo sapiens
GIIDPTK

SEQ ID NO: 910 - protein, 7 aa, Homo sapiens
GIIDPTK

SEQ ID NO: 911 - protein, 7 aa, Homo sapiens
GIIDPTK

SEQ ID NO: 912 - protein, 12 aa, Homo sapiens
GYISPYFINTSK

SEQ ID NO: 913 - protein, 12 aa, Homo sapiens
GYISPYFINTSK

SEQ ID NO: 914 - protein, 12 aa, Homo sapiens
GYISPYFINTSK

SEQ ID NO: 915 - protein, 12 aa, Homo sapiens
GYISPYFINTSK

SEQ ID NO: 916 - protein, 25 aa, Homo sapiens
LVQDVANNTNEEAGDGTTTATVLAR

SEQ ID NO: 917 - protein, 25 aa, Homo sapiens
LVQDVANNTNEEAGDGTTTATVLAR

SEQ ID NO: 918 - protein, 25 aa, Homo sapiens
LVQDVANNTNEEAGDGTTTATVLAR

SEQ ID NO: 919 - protein, 25 aa, Homo sapiens
LVQDVANNTNEEAGDGTTTATVLAR

SEQ ID NO: 920 - protein, 25 aa, Homo sapiens
TALLDAAGVASLLTTAEVVVTEIPK

SEQ ID NO: 921 - protein, 25 aa, Homo sapiens
TALLDAAGVASLLTTAEVVVTEIPK

SEQ ID NO: 922 - protein, 25 aa, Homo sapiens
TALLDAAGVASLLTTAEVVVTEIPK

SEQ ID NO: 923 - protein, 25 aa, Homo sapiens
TALLDAAGVASLLTTAEVVVTEIPK

SEQ ID NO: 924 - protein, 12 aa, Homo sapiens
TVIIEQSWGSPK

SEQ ID NO: 925 - protein, 12 aa, Homo sapiens
TVIIEQSWGSPK

SEQ ID NO: 926 - protein, 12 aa, Homo sapiens
TVIIEQSWGSPK

SEQ ID NO: 927 - protein, 12 aa, Homo sapiens
TVIIEQSWGSPK

SEQ ID NO: 928 - protein, 12 aa, Homo sapiens
DFTSLENTVEER

SEQ ID NO: 929 - protein, 12 aa, Homo sapiens
DFTSLENTVEER

SEQ ID NO: 930 - protein, 12 aa, Homo sapiens
DFTSLENTVEER

SEQ ID NO: 931 - protein, 12 aa, Homo sapiens
DFTSLENTVEER

SEQ ID NO: 932 - protein, 12 aa, Homo sapiens
IETNENNLESAK

SEQ ID NO: 933 - protein, 12 aa, Homo sapiens
IETNENNLESAK

SEQ ID NO: 934 - protein, 12 aa, Homo sapiens
IETNENNLESAK

SEQ ID NO: 935 - protein, 12 aa, Homo sapiens
IETNENNLESAK

SEQ ID NO: 936 - protein, 19 aa, Homo sapiens
LEGLGSSEADQDGLASTVR

SEQ ID NO: 937 - protein, 19 aa, Homo sapiens
LEGLGSSEADQDGLASTVR

SEQ ID NO: 938 - protein, 19 aa, Homo sapiens
LEGLGSSEADQDGLASTVR

SEQ ID NO: 939 - protein, 19 aa, Homo sapiens
LEGLGSSEADQDGLASTVR

SEQ ID NO: 940 - protein, 9 aa, Homo sapiens
LPPQDFLDR

SEQ ID NO: 941 - protein, 16 aa, Homo sapiens
VQSLQATFGTFESILR

SEQ ID NO: 942 - protein, 23 aa, Homo sapiens
ASAPLSQSGLATANGKPEPTSIS

SEQ ID NO: 943 - protein, 23 aa, Homo sapiens
ASAPLSQSGLATANGKPEPTSIS

SEQ ID NO: 944 - protein, 23 aa, Homo sapiens
ASAPLSQSGLATANGKPEPTSIS

SEQ ID NO: 945 - protein, 23 aa, Homo sapiens
ASAPLSQSGLATANGKPEPTSIS

SEQ ID NO: 946 - protein, 19 aa, Homo sapiens
GDPDSEADSIDSDQEDPLK

SEQ ID NO: 947 - protein, 19 aa, Homo sapiens
GDPDSEADSIDSDQEDPLK

SEQ ID NO: 948 - protein, 19 aa, Homo sapiens
GDPDSEADSIDSDQEDPLK

SEQ ID NO: 949 - protein, 19 aa, Homo sapiens
GDPDSEADSIDSDQEDPLK

SEQ ID NO: 950 - protein, 22 aa, Homo sapiens
ILDEDSWSDGEQEPITVDQTWR

SEQ ID NO: 951 - protein, 12 aa, Homo sapiens
TELGSQTPESSR

SEQ ID NO: 952 - protein, 12 aa, Homo sapiens
TELGSQTPESSR

SEQ ID NO: 953 - protein, 12 aa, Homo sapiens
TELGSQTPESSR

SEQ ID NO: 954 - protein, 12 aa, Homo sapiens
TELGSQTPESSR

SEQ ID NO: 955 - protein, 9 aa, Homo sapiens
YGVEALLHR

SEQ ID NO: 956 - protein, 9 aa, Homo sapiens
YGVEALLHR

SEQ ID NO: 957 - protein, 9 aa, Homo sapiens
YGVEALLHR

SEQ ID NO: 958 - protein, 9 aa, Homo sapiens
YGVEALLHR

SEQ ID NO: 959 - protein, 13 aa, Homo sapiens
ASVTALIESVNGK

SEQ ID NO: 960 - protein, 13 aa, Homo sapiens
ASVTALIESVNGK

SEQ ID NO: 961 - protein, 13 aa, Homo sapiens
ASVTALIESVNGK

SEQ ID NO: 962 - protein, 13 aa, Homo sapiens
ASVTALIESVNGK

SEQ ID NO: 963 - protein, 8 aa, Homo sapiens
SEISNIAR

SEQ ID NO: 964 - protein, 30 aa, Homo sapiens
TSSGGSFVASDVPNAPIPDLFPPGQITDLK

SEQ ID NO: 965 - protein, 17 aa, Homo sapiens
TVTLELLDNGAGADATK

SEQ ID NO: 966 - protein, 17 aa, Homo sapiens
TVTLELLDNGAGADATK

SEQ ID NO: 967 - protein, 17 aa, Homo sapiens
TVTLELLDNGAGADATK

SEQ ID NO: 968 - protein, 17 aa, Homo sapiens
TVTLELLDNGAGADATK

SEQ ID NO: 969 - protein, 12 aa, Homo sapiens
WGVFDEYNNDEK

SEQ ID NO: 970 - protein, 6 aa, Homo sapiens
FSAYIK

SEQ ID NO: 971 - protein, 6 aa, Homo sapiens
FSAYIK

SEQ ID NO: 972 - protein, 6 aa, Homo sapiens
FSAYIK

SEQ ID NO: 973 - protein, 6 aa, Homo sapiens
FSAYIK

SEQ ID NO: 974 - protein, 9 aa, Homo sapiens
GFTIPEAFR

SEQ ID NO: 975 - protein, 18 aa, Homo sapiens
LAALNPESNTAGLDIFAK

SEQ ID NO: 976 - protein, 18 aa, Homo sapiens
LAALNPESNTAGLDIFAK

SEQ ID NO: 977 - protein, 18 aa, Homo sapiens
LAALNPESNTAGLDIFAK

SEQ ID NO: 978 - protein, 18 aa, Homo sapiens
LAALNPESNTAGLDIFAK

SEQ ID NO: 979 - protein, 12 aa, Homo sapiens
NSNPALNDNLEK

SEQ ID NO: 980 - protein, 12 aa, Homo sapiens
NSNPALNDNLEK

SEQ ID NO: 981 - protein, 12 aa, Homo sapiens
NSNPALNDNLEK

SEQ ID NO: 982 - protein, 12 aa, Homo sapiens
NSNPALNDNLEK

SEQ ID NO: 983 - protein, 8 aa, Homo sapiens
YLSNAYAR

SEQ ID NO: 984 - protein, 8 aa, Homo sapiens
YLSNAYAR

SEQ ID NO: 985 - protein, 8 aa, Homo sapiens
YLSNAYAR

SEQ ID NO: 986 - protein, 8 aa, Homo sapiens
YLSNAYAR

SEQ ID NO: 987 - protein, 12 aa, Homo sapiens
ASSIIDELFQDR

SEQ ID NO: 988 - protein, 12 aa, Homo sapiens
ASSIIDELFQDR

SEQ ID NO: 989 - protein, 12 aa, Homo sapiens
ASSIIDELFQDR

SEQ ID NO: 990 - protein, 12 aa, Homo sapiens
ASSIIDELFQDR

SEQ ID NO: 991 - protein, 10 aa, Homo sapiens
EIQNAVNGVK

SEQ ID NO: 992 - protein, 10 aa, Homo sapiens
EIQNAVNGVK

SEQ ID NO: 993 - protein, 10 aa, Homo sapiens
EIQNAVNGVK

SEQ ID NO: 994 - protein, 10 aa, Homo sapiens
EIQNAVNGVK

SEQ ID NO: 995 - protein, 9 aa, Homo sapiens
IDSLLENDR

SEQ ID NO: 996 - protein, 9 aa, Homo sapiens
IDSLLENDR

SEQ ID NO: 997 - protein, 9 aa, Homo sapiens
IDSLLENDR

SEQ ID NO: 998 - protein, 9 aa, Homo sapiens
IDSLLENDR

SEQ ID NO: 999 - protein, 14 aa, Homo sapiens
LANLTQGEDQYYLR

SEQ ID NO: 1000 - protein, 14 aa, Homo sapiens
LANLTQGEDQYYLR

SEQ ID NO: 1001 - protein, 14 aa, Homo sapiens
LANLTQGEDQYYLR

SEQ ID NO: 1002 - protein, 14 aa, Homo sapiens
LANLTQGEDQYYLR

SEQ ID NO: 1003 - protein, 23 aa, Homo sapiens
VTTVASHTSDSDVPSGVTEVVVK

SEQ ID NO: 1004 - protein, 31 aa, Homo sapiens
AEGNNQAPGEEEEEEEEATNTHPPASLPSQK

SEQ ID NO: 1005 - protein, 9 aa, Homo sapiens
EAVEEPSSK

SEQ ID NO: 1006 - protein, 9 aa, Homo sapiens
EAVEEPSSK

SEQ ID NO: 1007 - protein, 9 aa, Homo sapiens
EAVEEPSSK

SEQ ID NO: 1008 - protein, 9 aa, Homo sapiens
EAVEEPSSK

SEQ ID NO: 1009 - protein, 23 aa, Homo sapiens
SEALAVDGAGKPGAEEAQDPEGK

SEQ ID NO: 1010 - protein, 23 aa, Homo sapiens
SEALAVDGAGKPGAEEAQDPEGK

SEQ ID NO: 1011 - protein, 23 aa, Homo sapiens
SEALAVDGAGKPGAEEAQDPEGK

SEQ ID NO: 1012 - protein, 23 aa, Homo sapiens
SEALAVDGAGKPGAEEAQDPEGK

SEQ ID NO: 1013 - protein, 10 aa, Homo sapiens
SGELEQEEER

SEQ ID NO: 1014 - protein, 10 aa, Homo sapiens
SGELEQEEER

SEQ ID NO: 1015 - protein, 10 aa, Homo sapiens
SGELEQEEER

SEQ ID NO: 1016 - protein, 10 aa, Homo sapiens
SGELEQEEER

SEQ ID NO: 1017 - protein, 20 aa, Homo sapiens
YPGPQAEGDSEGLSQGLVDR

SEQ ID NO: 1018 - protein, 20 aa, Homo sapiens
YPGPQAEGDSEGLSQGLVDR

SEQ ID NO: 1019 - protein, 20 aa, Homo sapiens
YPGPQAEGDSEGLSQGLVDR

SEQ ID NO: 1020 - protein, 20 aa, Homo sapiens
YPGPQAEGDSEGLSQGLVDR

SEQ ID NO: 1021 - protein, 14 aa, Homo sapiens
AHSDGGDGVVSQVK

SEQ ID NO: 1022 - protein, 14 aa, Homo sapiens
AHSDGGDGVVSQVK

SEQ ID NO: 1023 - protein, 14 aa, Homo sapiens
AHSDGGDGVVSQVK

SEQ ID NO: 1024 - protein, 14 aa, Homo sapiens
AHSDGGDGVVSQVK

SEQ ID NO: 1025 - protein, 9 aa, Homo sapiens
DGEYVVEVR

SEQ ID NO: 1026 - protein, 9 aa, Homo sapiens
DGEYVVEVR

SEQ ID NO: 1027 - protein, 9 aa, Homo sapiens
DGEYVVEVR

SEQ ID NO: 1028 - protein, 9 aa, Homo sapiens
DGEYVVEVR

SEQ ID NO: 1029 - protein, 9 aa, Homo sapiens
HSIEVPIPR

SEQ ID NO: 1030 - protein, 23 aa, Homo sapiens
STEATLSFGYLDPFPPEERPEVR

SEQ ID NO: 1031 - protein, 14 aa, Homo sapiens
TTKPYPADIVVQFK

SEQ ID NO: 1032 - protein, 14 aa, Homo sapiens
TTKPYPADIVVQFK

SEQ ID NO: 1033 - protein, 14 aa, Homo sapiens
TTKPYPADIVVQFK

SEQ ID NO: 1034 - protein, 14 aa, Homo sapiens
TTKPYPADIVVQFK

SEQ ID NO: 1035 - protein, 11 aa, Homo sapiens
GDPGTPGVPGK

SEQ ID NO: 1036 - protein, 11 aa, Homo sapiens
GDPGTPGVPGK

SEQ ID NO: 1037 - protein, 11 aa, Homo sapiens
GDPGTPGVPGK

SEQ ID NO: 1038 - protein, 11 aa, Homo sapiens
GDPGTPGVPGK

SEQ ID NO: 1039 - protein, 11 aa, Homo sapiens
GEPGVGLPGLK

SEQ ID NO: 1040 - protein, 11 aa, Homo sapiens
GEPGVGLPGLK

SEQ ID NO: 1041 - protein, 11 aa, Homo sapiens
GEPGVGLPGLK

SEQ ID NO: 1042 - protein, 11 aa, Homo sapiens
GEPGVGLPGLK

SEQ ID NO: 1043 - protein, 12 aa, Homo sapiens
GPPGGVGFPGSR

SEQ ID NO: 1044 - protein, 21 aa, Homo sapiens
GPPGPQGPPGEIGFPGQPGAK

SEQ ID NO: 1045 - protein, 21 aa, Homo sapiens
GPPGPQGPPGEIGFPGQPGAK

SEQ ID NO: 1046 - protein, 21 aa, Homo sapiens
GPPGPQGPPGEIGFPGQPGAK

SEQ ID NO: 1047 - protein, 21 aa, Homo sapiens
GPPGPQGPPGEIGFPGQPGAK

SEQ ID NO: 1048 - protein, 16 aa, Homo sapiens
ILYHGYSLLYVQGNER

SEQ ID NO: 1049 - protein, 16 aa, Homo sapiens
ILYHGYSLLYVQGNER

SEQ ID NO: 1050 - protein, 16 aa, Homo sapiens
ILYHGYSLLYVQGNER

SEQ ID NO: 1051 - protein, 16 aa, Homo sapiens
ILYHGYSLLYVQGNER

SEQ ID NO: 1052 - protein, 19 aa, Homo sapiens
DGEVGPSGPVGPPGLAGER

SEQ ID NO: 1053 - protein, 19 aa, Homo sapiens
DGEVGPSGPVGPPGLAGER

SEQ ID NO: 1054 - protein, 19 aa, Homo sapiens
DGEVGPSGPVGPPGLAGER

SEQ ID NO: 1055 - protein, 19 aa, Homo sapiens
DGEVGPSGPVGPPGLAGER

SEQ ID NO: 1056 - protein, 17 aa, Homo sapiens
GPEGPPGKPGEDGEPGR

SEQ ID NO: 1057 - protein, 17 aa, Homo sapiens
GPEGPPGKPGEDGEPGR

SEQ ID NO: 1058 - protein, 17 aa, Homo sapiens
GPEGPPGKPGEDGEPGR

SEQ ID NO: 1059 - protein, 17 aa, Homo sapiens
GPEGPPGKPGEDGEPGR

SEQ ID NO: 1060 - protein, 17 aa, Homo sapiens
GTQGPPGATGFPGSAGR

SEQ ID NO: 1061 - protein, 17 aa, Homo sapiens
GTQGPPGATGFPGSAGR

SEQ ID NO: 1062 - protein, 17 aa, Homo sapiens
GTQGPPGATGFPGSAGR

SEQ ID NO: 1063 - protein, 17 aa, Homo sapiens
GTQGPPGATGFPGSAGR

SEQ ID NO: 1064 - protein, 22 aa, Homo sapiens
LGPLGAPGEDGRPGPPGSIGIR

SEQ ID NO: 1065 - protein, 21 aa, Homo sapiens
VGPPGPAGAPGPAGPLGEPGK

SEQ ID NO: 1066 - protein, 21 aa, Homo sapiens
VGPPGPAGAPGPAGPLGEPGK

SEQ ID NO: 1067 - protein, 21 aa, Homo sapiens
VGPPGPAGAPGPAGPLGEPGK

SEQ ID NO: 1068 - protein, 21 aa, Homo sapiens
VGPPGPAGAPGPAGPLGEPGK

SEQ ID NO: 1069 - protein, 21 aa, Homo sapiens
ALGSAIEYTIENVFESAPNPR

SEQ ID NO: 1070 - protein, 21 aa, Homo sapiens
ALGSAIEYTIENVFESAPNPR

SEQ ID NO: 1071 - protein, 21 aa, Homo sapiens
ALGSAIEYTIENVFESAPNPR

SEQ ID NO: 1072 - protein, 21 aa, Homo sapiens
ALGSAIEYTIENVFESAPNPR

SEQ ID NO: 1073 - protein, 13 aa, Homo sapiens
IGDLHPQIVNLLK

SEQ ID NO: 1074 - protein, 13 aa, Homo sapiens
IGDLHPQIVNLLK

SEQ ID NO: 1075 - protein, 13 aa, Homo sapiens
IGDLHPQIVNLLK

SEQ ID NO: 1076 - protein, 13 aa, Homo sapiens
IGDLHPQIVNLLK

SEQ ID NO: 1077 - protein, 25 aa, Homo sapiens
NADPAELEQIVLSPAFILAAESLPK

SEQ ID NO: 1078 - protein, 25 aa, Homo sapiens
NADPAELEQIVLSPAFILAAESLPK

SEQ ID NO: 1079 - protein, 25 aa, Homo sapiens
NADPAELEQIVLSPAFILAAESLPK

SEQ ID NO: 1080 - protein, 25 aa, Homo sapiens
NADPAELEQIVLSPAFILAAESLPK

SEQ ID NO: 1081 - protein, 9 aa, Homo sapiens
VAVVQYSDR

SEQ ID NO: 1082 - protein, 9 aa, Homo sapiens
VAVVQYSDR

SEQ ID NO: 1083 - protein, 9 aa, Homo sapiens
VAVVQYSDR

SEQ ID NO: 1084 - protein, 9 aa, Homo sapiens
VAVVQYSDR

SEQ ID NO: 1085 - protein, 8 aa, Homo sapiens
WYYDPNTK

SEQ ID NO: 1086 - protein, 8 aa, Homo sapiens
WYYDPNTK

SEQ ID NO: 1087 - protein, 8 aa, Homo sapiens
WYYDPNTK

SEQ ID NO: 1088 - protein, 8 aa, Homo sapiens
WYYDPNTK

SEQ ID NO: 1089 - protein, 16 aa, Homo sapiens
GPGDLEAPSNLVISER

SEQ ID NO: 1090 - protein, 16 aa, Homo sapiens
GPGDLEAPSNLVISER

SEQ ID NO: 1091 - protein, 16 aa, Homo sapiens
GPGDLEAPSNLVISER

SEQ ID NO: 1092 - protein, 16 aa, Homo sapiens
GPGDLEAPSNLVISER

SEQ ID NO: 1093 - protein, 12 aa, Homo sapiens
ITVDPTTDGPTK

SEQ ID NO: 1094 - protein, 12 aa, Homo sapiens
ITVDPTTDGPTK

SEQ ID NO: 1095 - protein, 12 aa, Homo sapiens
ITVDPTTDGPTK

SEQ ID NO: 1096 - protein, 12 aa, Homo sapiens
ITVDPTTDGPTK

SEQ ID NO: 1097 - protein, 11 aa, Homo sapiens
SLYDDVDTGEK

SEQ ID NO: 1098 - protein, 11 aa, Homo sapiens
SLYDDVDTGEK

SEQ ID NO: 1099 - protein, 11 aa, Homo sapiens
SLYDDVDTGEK

SEQ ID NO: 1100 - protein, 11 aa, Homo sapiens
SLYDDVDTGEK

SEQ ID NO: 1101 - protein, 10 aa, Homo sapiens
SQDEVEIPAR

SEQ ID NO: 1102 - protein, 10 aa, Homo sapiens
SQDEVEIPAR

SEQ ID NO: 1103 - protein, 10 aa, Homo sapiens
SQDEVEIPAR

SEQ ID NO: 1104 - protein, 10 aa, Homo sapiens
SQDEVEIPAR

SEQ ID NO: 1105 - protein, 10 aa, Homo sapiens
VTDETTDSFK

SEQ ID NO: 1106 - protein, 10 aa, Homo sapiens
VTDETTDSFK

SEQ ID NO: 1107 - protein, 10 aa, Homo sapiens
VTDETTDSFK

SEQ ID NO: 1108 - protein, 10 aa, Homo sapiens
VTDETTDSFK

SEQ ID NO: 1109 - protein, 20 aa, Homo sapiens
EILVGDVGQTVDDPYATFVK

SEQ ID NO: 1110 - protein, 20 aa, Homo sapiens
EILVGDVGQTVDDPYATFVK

SEQ ID NO: 1111 - protein, 20 aa, Homo sapiens
EILVGDVGQTVDDPYATFVK

SEQ ID NO: 1112 - protein, 20 aa, Homo sapiens
EILVGDVGQTVDDPYATFVK

SEQ ID NO: 1113 - protein, 14 aa, Homo sapiens
LGGSAVISLEGKPL

SEQ ID NO: 1114 - protein, 14 aa, Homo sapiens
LGGSAVISLEGKPL

SEQ ID NO: 1115 - protein, 14 aa, Homo sapiens
LGGSAVISLEGKPL

SEQ ID NO: 1116 - protein, 14 aa, Homo sapiens
LGGSAVISLEGKPL

SEQ ID NO: 1117 - protein, 11 aa, Homo sapiens
YALYDATYETK

SEQ ID NO: 1118 - protein, 11 aa, Homo sapiens
YALYDATYETK

SEQ ID NO: 1119 - protein, 11 aa, Homo sapiens
YALYDATYETK

SEQ ID NO: 1120 - protein, 11 aa, Homo sapiens
YALYDATYETK

SEQ ID NO: 1121 - protein, 10 aa, Homo sapiens
ADDILASPPR

SEQ ID NO: 1122 - protein, 10 aa, Homo sapiens
ADDILASPPR

SEQ ID NO: 1123 - protein, 10 aa, Homo sapiens
ADDILASPPR

SEQ ID NO: 1124 - protein, 10 aa, Homo sapiens
ADDILASPPR

SEQ ID NO: 1125 - protein, 9 aa, Homo sapiens
AVGLAGTFR

SEQ ID NO: 1126 - protein, 9 aa, Homo sapiens
AVGLAGTFR

SEQ ID NO: 1127 - protein, 9 aa, Homo sapiens
AVGLAGTFR

SEQ ID NO: 1128 - protein, 9 aa, Homo sapiens
AVGLAGTFR

SEQ ID NO: 1129 - protein, 24 aa, Homo sapiens
DELLFPSWEALFSGSEGPLKPGAR

SEQ ID NO: 1130 - protein, 30 aa, Homo sapiens
LSGVQDGHQDISLLYTEPGAGQTHTAASFR

SEQ ID NO: 1131 - protein, 17 aa, Homo sapiens
TEAPSATGQASSLLGGR

SEQ ID NO: 1132 - protein, 17 aa, Homo sapiens
TEAPSATGQASSLLGGR

SEQ ID NO: 1133 - protein, 17 aa, Homo sapiens
TEAPSATGQASSLLGGR

SEQ ID NO: 1134 - protein, 17 aa, Homo sapiens
TEAPSATGQASSLLGGR

SEQ ID NO: 1135 - protein, 29 aa, Homo sapiens
EIYPYVIQELRPTLNELGISTPEELGLDK

SEQ ID NO: 1136 - protein, 7 aa, Homo sapiens
GLLHSAR

SEQ ID NO: 1137 - protein, 7 aa, Homo sapiens
GLLHSAR

SEQ ID NO: 1138 - protein, 7 aa, Homo sapiens
GLLHSAR

SEQ ID NO: 1139 - protein, 7 aa, Homo sapiens
GLLHSAR

SEQ ID NO: 1140 - protein, 7 aa, Homo sapiens
IIDAALR

SEQ ID NO: 1141 - protein, 7 aa, Homo sapiens
IIDAALR

SEQ ID NO: 1142 - protein, 7 aa, Homo sapiens
IIDAALR

SEQ ID NO: 1143 - protein, 7 aa, Homo sapiens
IIDAALR

SEQ ID NO: 1144 - protein, 6 aa, Homo sapiens
ILEVVK

SEQ ID NO: 1145 - protein, 6 aa, Homo sapiens
ILEVVK

SEQ ID NO: 1146 - protein, 6 aa, Homo sapiens
ILEVVK

SEQ ID NO: 1147 - protein, 6 aa, Homo sapiens
ILEVVK

SEQ ID NO: 1148 - protein, 12 aa, Homo sapiens
TPGPAVAIQSVR

SEQ ID NO: 1149 - protein, 8 aa, Homo sapiens
APLTKPLK

SEQ ID NO: 1150 - protein, 8 aa, Homo sapiens
APLTKPLK

SEQ ID NO: 1151 - protein, 8 aa, Homo sapiens
APLTKPLK

SEQ ID NO: 1152 - protein, 8 aa, Homo sapiens
APLTKPLK

SEQ ID NO: 1153 - protein, 10 aa, Homo sapiens
ESDTSYVSLK

SEQ ID NO: 1154 - protein, 10 aa, Homo sapiens
ESDTSYVSLK

SEQ ID NO: 1155 - protein, 10 aa, Homo sapiens
ESDTSYVSLK

SEQ ID NO: 1156 - protein, 10 aa, Homo sapiens
ESDTSYVSLK

SEQ ID NO: 1157 - protein, 15 aa, Homo sapiens
YEVQGEVFTKPQLWP

SEQ ID NO: 1158 - protein, 15 aa, Homo sapiens
YEVQGEVFTKPQLWP

SEQ ID NO: 1159 - protein, 15 aa, Homo sapiens
YEVQGEVFTKPQLWP

SEQ ID NO: 1160 - protein, 15 aa, Homo sapiens
YEVQGEVFTKPQLWP

SEQ ID NO: 1161 - protein, 15 aa, Homo sapiens
AQADLLAHLVPEPDR

SEQ ID NO: 1162 - protein, 15 aa, Homo sapiens
AQADLLAHLVPEPDR

SEQ ID NO: 1163 - protein, 15 aa, Homo sapiens
AQADLLAHLVPEPDR

SEQ ID NO: 1164 - protein, 15 aa, Homo sapiens
AQADLLAHLVPEPDR

SEQ ID NO: 1165 - protein, 9 aa, Homo sapiens
DTGVAFELR

SEQ ID NO: 1166 - protein, 9 aa, Homo sapiens
DTGVAFELR

SEQ ID NO: 1167 - protein, 9 aa, Homo sapiens
DTGVAFELR

SEQ ID NO: 1168 - protein, 9 aa, Homo sapiens
DTGVAFELR

SEQ ID NO: 1169 - protein, 25 aa, Homo sapiens
GYWGDIATGPFVAFGIEADDESLLR

SEQ ID NO: 1170 - protein, 11 aa, Homo sapiens
LEEQLPWLSLR

SEQ ID NO: 1171 - protein, 11 aa, Homo sapiens
LEEQLPWLSLR

SEQ ID NO: 1172 - protein, 11 aa, Homo sapiens
LEEQLPWLSLR

SEQ ID NO: 1173 - protein, 11 aa, Homo sapiens
LEEQLPWLSLR

SEQ ID NO: 1174 - protein, 15 aa, Homo sapiens
TAGEITQHNVTELLR

SEQ ID NO: 1175 - protein, 15 aa, Homo sapiens
TAGEITQHNVTELLR

SEQ ID NO: 1176 - protein, 15 aa, Homo sapiens
TAGEITQHNVTELLR

SEQ ID NO: 1177 - protein, 15 aa, Homo sapiens
TAGEITQHNVTELLR

SEQ ID NO: 1178 - protein, 18 aa, Homo sapiens
DNTPNAIAIVQLQELSLR

SEQ ID NO: 1179 - protein, 9 aa, Homo sapiens
DPPEPGSPR

SEQ ID NO: 1180 - protein, 9 aa, Homo sapiens
DPPEPGSPR

SEQ ID NO: 1181 - protein, 9 aa, Homo sapiens
DPPEPGSPR

SEQ ID NO: 1182 - protein, 9 aa, Homo sapiens
DPPEPGSPR

SEQ ID NO: 1183 - protein, 13 aa, Homo sapiens
FNSVPLTDTGHER

SEQ ID NO: 1184 - protein, 13 aa, Homo sapiens
FNSVPLTDTGHER

SEQ ID NO: 1185 - protein, 13 aa, Homo sapiens
FNSVPLTDTGHER

SEQ ID NO: 1186 - protein, 13 aa, Homo sapiens
FNSVPLTDTGHER

SEQ ID NO: 1187 - protein, 23 aa, Homo sapiens
ISSLRPQGLSNPSTLSAQPQLSR

SEQ ID NO: 1188 - protein, 23 aa, Homo sapiens
ISSLRPQGLSNPSTLSAQPQLSR

SEQ ID NO: 1189 - protein, 23 aa, Homo sapiens
ISSLRPQGLSNPSTLSAQPQLSR

SEQ ID NO: 1190 - protein, 23 aa, Homo sapiens
ISSLRPQGLSNPSTLSAQPQLSR

SEQ ID NO: 1191 - protein, 12 aa, Homo sapiens
TFYETPLQLLEK

SEQ ID NO: 1192 - protein, 6 aa, Homo sapiens
IELPER

SEQ ID NO: 1193 - protein, 6 aa, Homo sapiens
IELPER

SEQ ID NO: 1194 - protein, 6 aa, Homo sapiens
IELPER

SEQ ID NO: 1195 - protein, 6 aa, Homo sapiens
IELPER

SEQ ID NO: 1196 - protein, 9 aa, Homo sapiens
IRPVTPVEK

SEQ ID NO: 1197 - protein, 9 aa, Homo sapiens
IRPVTPVEK

SEQ ID NO: 1198 - protein, 9 aa, Homo sapiens
IRPVTPVEK

SEQ ID NO: 1199 - protein, 9 aa, Homo sapiens
IRPVTPVEK

SEQ ID NO: 1200 - protein, 19 aa, Homo sapiens
QNWPQNWGFLTTPFEELIK

SEQ ID NO: 1201 - protein, 19 aa, Homo sapiens
QNWPQNWGFLTTPFEELIK

SEQ ID NO: 1202 - protein, 19 aa, Homo sapiens
QNWPQNWGFLTTPFEELIK

SEQ ID NO: 1203 - protein, 19 aa, Homo sapiens
QNWPQNWGFLTTPFEELIK

SEQ ID NO: 1204 - protein, 8 aa, Homo sapiens
SAVPGLNK

SEQ ID NO: 1205 - protein, 8 aa, Homo sapiens
SAVPGLNK

SEQ ID NO: 1206 - protein, 8 aa, Homo sapiens
SAVPGLNK

SEQ ID NO: 1207 - protein, 8 aa, Homo sapiens
SAVPGLNK

SEQ ID NO: 1208 - protein, 18 aa, Homo sapiens
VFPSPPVPQTTQGFIGWR

SEQ ID NO: 1209 - protein, 18 aa, Homo sapiens
VFPSPPVPQTTQGFIGWR

SEQ ID NO: 1210 - protein, 18 aa, Homo sapiens
VFPSPPVPQTTQGFIGWR

SEQ ID NO: 1211 - protein, 18 aa, Homo sapiens
VFPSPPVPQTTQGFIGWR

SEQ ID NO: 1212 - protein, 13 aa, Homo sapiens
DQTVVGPALAAYR

SEQ ID NO: 1213 - protein, 13 aa, Homo sapiens
DQTVVGPALAAYR

SEQ ID NO: 1214 - protein, 13 aa, Homo sapiens
DQTVVGPALAAYR

SEQ ID NO: 1215 - protein, 13 aa, Homo sapiens
DQTVVGPALAAYR

SEQ ID NO: 1216 - protein, 9 aa, Homo sapiens
TTTLPVEFK

SEQ ID NO: 1217 - protein, 9 aa, Homo sapiens
TTTLPVEFK

SEQ ID NO: 1218 - protein, 9 aa, Homo sapiens
TTTLPVEFK

SEQ ID NO: 1219 - protein, 9 aa, Homo sapiens
TTTLPVEFK

SEQ ID NO: 1220 - protein, 13 aa, Homo sapiens
ALALVVTLLHLTR

SEQ ID NO: 1221 - protein, 13 aa, Homo sapiens
ELGFDASEVELTR

SEQ ID NO: 1222 - protein, 13 aa, Homo sapiens
ELGFDASEVELTR

SEQ ID NO: 1223 - protein, 13 aa, Homo sapiens
ELGFDASEVELTR

SEQ ID NO: 1224 - protein, 13 aa, Homo sapiens
ELGFDASEVELTR

SEQ ID NO: 1225 - protein, 10 aa, Homo sapiens
ILYNPLQGQK

SEQ ID NO: 1226 - protein, 7 aa, Homo sapiens
LFNDIHK

SEQ ID NO: 1227 - protein, 7 aa, Homo sapiens
LFNDIHK

SEQ ID NO: 1228 - protein, 7 aa, Homo sapiens
LFNDIHK

SEQ ID NO: 1229 - protein, 7 aa, Homo sapiens
LFNDIHK

SEQ ID NO: 1230 - protein, 9 aa, Homo sapiens
NNELIAVGK

SEQ ID NO: 1231 - protein, 9 aa, Homo sapiens
NNELIAVGK

SEQ ID NO: 1232 - protein, 9 aa, Homo sapiens
NNELIAVGK

SEQ ID NO: 1233 - protein, 9 aa, Homo sapiens
NNELIAVGK

SEQ ID NO: 1234 - protein, 7 aa, Homo sapiens
LEAVQYK

SEQ ID NO: 1235 - protein, 7 aa, Homo sapiens
LEAVQYK

SEQ ID NO: 1236 - protein, 7 aa, Homo sapiens
LEAVQYK

SEQ ID NO: 1237 - protein, 7 aa, Homo sapiens
LEAVQYK

SEQ ID NO: 1238 - protein, 18 aa, Homo sapiens
SLPGQNEDLVLTGYQVDK

SEQ ID NO: 1239 - protein, 18 aa, Homo sapiens
SLPGQNEDLVLTGYQVDK

SEQ ID NO: 1240 - protein, 18 aa, Homo sapiens
SLPGQNEDLVLTGYQVDK

SEQ ID NO: 1241 - protein, 18 aa, Homo sapiens
SLPGQNEDLVLTGYQVDK

SEQ ID NO: 1242 - protein, 7 aa, Homo sapiens
TNETYGK

SEQ ID NO: 1243 - protein, 7 aa, Homo sapiens
TNETYGK

SEQ ID NO: 1244 - protein, 7 aa, Homo sapiens
TNETYGK

SEQ ID NO: 1245 - protein, 7 aa, Homo sapiens
TNETYGK

SEQ ID NO: 1246 - protein, 12 aa, Homo sapiens
TQVVAGTNYYIK

SEQ ID NO: 1247 - protein, 8 aa, Homo sapiens
VKPQLEEK

SEQ ID NO: 1248 - protein, 8 aa, Homo sapiens
VKPQLEEK

SEQ ID NO: 1249 - protein, 8 aa, Homo sapiens
VKPQLEEK

SEQ ID NO: 1250 - protein, 8 aa, Homo sapiens
VKPQLEEK

SEQ ID NO: 1251 - protein, 7 aa, Homo sapiens
HDELTYF

SEQ ID NO: 1252 - protein, 6 aa, Homo sapiens
SQLEEK

SEQ ID NO: 1253 - protein, 6 aa, Homo sapiens
SQLEEK

SEQ ID NO: 1254 - protein, 6 aa, Homo sapiens
SQLEEK

SEQ ID NO: 1255 - protein, 6 aa, Homo sapiens
SQLEEK

SEQ ID NO: 1256 - protein, 12 aa, Homo sapiens
SQVVAGTNYFIK

SEQ ID NO: 1257 - protein, 12 aa, Homo sapiens
SQVVAGTNYFIK

SEQ ID NO: 1258 - protein, 12 aa, Homo sapiens
SQVVAGTNYFIK

SEQ ID NO: 1259 - protein, 12 aa, Homo sapiens
SQVVAGTNYFIK

SEQ ID NO: 1260 - protein, 21 aa, Homo sapiens
VFQSLPHENKPLTLSNYQTNK

SEQ ID NO: 1261 - protein, 21 aa, Homo sapiens
VFQSLPHENKPLTLSNYQTNK

SEQ ID NO: 1262 - protein, 21 aa, Homo sapiens
VFQSLPHENKPLTLSNYQTNK

SEQ ID NO: 1263 - protein, 21 aa, Homo sapiens
VFQSLPHENKPLTLSNYQTNK

SEQ ID NO: 1264 - protein, 12 aa, Homo sapiens
VHVGDEDFVHLR

SEQ ID NO: 1265 - protein, 12 aa, Homo sapiens
VHVGDEDFVHLR

SEQ ID NO: 1266 - protein, 12 aa, Homo sapiens
VHVGDEDFVHLR

SEQ ID NO: 1267 - protein, 12 aa, Homo sapiens
VHVGDEDFVHLR

SEQ ID NO: 1268 - protein, 8 aa, Homo sapiens
DWVLNEFR

SEQ ID NO: 1269 - protein, 8 aa, Homo sapiens
DWVLNEFR

SEQ ID NO: 1270 - protein, 8 aa, Homo sapiens
DWVLNEFR

SEQ ID NO: 1271 - protein, 8 aa, Homo sapiens
DWVLNEFR

SEQ ID NO: 1272 - protein, 17 aa, Homo sapiens
FVINYDYPNSSEDYVHR

SEQ ID NO: 1273 - protein, 17 aa, Homo sapiens
FVINYDYPNSSEDYVHR

SEQ ID NO: 1274 - protein, 17 aa, Homo sapiens
FVINYDYPNSSEDYVHR

SEQ ID NO: 1275 - protein, 17 aa, Homo sapiens
FVINYDYPNSSEDYVHR

SEQ ID NO: 1276 - protein, 9 aa, Homo sapiens
LIDFLESGK

SEQ ID NO: 1277 - protein, 9 aa, Homo sapiens
LIDFLESGK

SEQ ID NO: 1278 - protein, 9 aa, Homo sapiens
LIDFLESGK

SEQ ID NO: 1279 - protein, 9 aa, Homo sapiens
LIDFLESGK

SEQ ID NO: 1280 - protein, 14 aa, Homo sapiens
SSQSSSQQFSGIGR

SEQ ID NO: 1281 - protein, 14 aa, Homo sapiens
SSQSSSQQFSGIGR

SEQ ID NO: 1282 - protein, 14 aa, Homo sapiens
SSQSSSQQFSGIGR

SEQ ID NO: 1283 - protein, 14 aa, Homo sapiens
SSQSSSQQFSGIGR

SEQ ID NO: 1284 - protein, 12 aa, Homo sapiens
VLEEANQAINPK

SEQ ID NO: 1285 - protein, 12 aa, Homo sapiens
VLEEANQAINPK

SEQ ID NO: 1286 - protein, 12 aa, Homo sapiens
VLEEANQAINPK

SEQ ID NO: 1287 - protein, 12 aa, Homo sapiens
VLEEANQAINPK

SEQ ID NO: 1288 - protein, 10 aa, Homo sapiens
IQSQFTDAQK

SEQ ID NO: 1289 - protein, 10 aa, Homo sapiens
IQSQFTDAQK

SEQ ID NO: 1290 - protein, 10 aa, Homo sapiens
IQSQFTDAQK

SEQ ID NO: 1291 - protein, 10 aa, Homo sapiens
IQSQFTDAQK

SEQ ID NO: 1292 - protein, 15 aa, Homo sapiens
ITNLTQQLEQASIVK

SEQ ID NO: 1293 - protein, 15 aa, Homo sapiens
ITNLTQQLEQASIVK

SEQ ID NO: 1294 - protein, 15 aa, Homo sapiens
ITNLTQQLEQASIVK

SEQ ID NO: 1295 - protein, 15 aa, Homo sapiens
ITNLTQQLEQASIVK

SEQ ID NO: 1296 - protein, 12 aa, Homo sapiens
NMPLQHLLEQIK

SEQ ID NO: 1297 - protein, 12 aa, Homo sapiens
NMPLQHLLEQIK

SEQ ID NO: 1298 - protein, 12 aa, Homo sapiens
NMPLQHLLEQIK

SEQ ID NO: 1299 - protein, 12 aa, Homo sapiens
NMPLQHLLEQIK

SEQ ID NO: 1300 - protein, 9 aa, Homo sapiens
YGDGIQLTR

SEQ ID NO: 1301 - protein, 9 aa, Homo sapiens
YGDGIQLTR

SEQ ID NO: 1302 - protein, 9 aa, Homo sapiens
YGDGIQLTR

SEQ ID NO: 1303 - protein, 9 aa, Homo sapiens
YGDGIQLTR

SEQ ID NO: 1304 - protein, 9 aa, Homo sapiens
ALPSLTDSK

SEQ ID NO: 1305 - protein, 9 aa, Homo sapiens
ALPSLTDSK

SEQ ID NO: 1306 - protein, 9 aa, Homo sapiens
ALPSLTDSK

SEQ ID NO: 1307 - protein, 9 aa, Homo sapiens
ALPSLTDSK

SEQ ID NO: 1308 - protein, 12 aa, Homo sapiens
GSLVVVSSLLGR

SEQ ID NO: 1309 - protein, 20 aa, Homo sapiens
LGGLDYLVLNHIGGAPAGTR

SEQ ID NO: 1310 - protein, 20 aa, Homo sapiens
LGGLDYLVLNHIGGAPAGTR

SEQ ID NO: 1311 - protein, 20 aa, Homo sapiens
LGGLDYLVLNHIGGAPAGTR

SEQ ID NO: 1312 - protein, 20 aa, Homo sapiens
LGGLDYLVLNHIGGAPAGTR

SEQ ID NO: 1313 - protein, 17 aa, Homo sapiens
NDGHLEPVTAWEVQVPR

SEQ ID NO: 1314 - protein, 17 aa, Homo sapiens
NDGHLEPVTAWEVQVPR

SEQ ID NO: 1315 - protein, 17 aa, Homo sapiens
NDGHLEPVTAWEVQVPR

SEQ ID NO: 1316 - protein, 17 aa, Homo sapiens
NDGHLEPVTAWEVQVPR

SEQ ID NO: 1317 - protein, 13 aa, Homo sapiens
VPTSFSTPYSAAK

SEQ ID NO: 1318 - protein, 13 aa, Homo sapiens
VPTSFSTPYSAAK

SEQ ID NO: 1319 - protein, 13 aa, Homo sapiens
VPTSFSTPYSAAK

SEQ ID NO: 1320 - protein, 13 aa, Homo sapiens
VPTSFSTPYSAAK

SEQ ID NO: 1321 - protein, 14 aa, Homo sapiens
FGQGSGPIVLDDVR

SEQ ID NO: 1322 - protein, 14 aa, Homo sapiens
FGQGSGPIVLDDVR

SEQ ID NO: 1323 - protein, 14 aa, Homo sapiens
FGQGSGPIVLDDVR

SEQ ID NO: 1324 - protein, 14 aa, Homo sapiens
FGQGSGPIVLDDVR

SEQ ID NO: 1325 - protein, 9 aa, Homo sapiens
INLGFSNLK

SEQ ID NO: 1326 - protein, 9 aa, Homo sapiens
INLGFSNLK

SEQ ID NO: 1327 - protein, 9 aa, Homo sapiens
INLGFSNLK

SEQ ID NO: 1328 - protein, 9 aa, Homo sapiens
INLGFSNLK

SEQ ID NO: 1329 - protein, 15 aa, Homo sapiens
VDVVLGPIQLQTPPR

SEQ ID NO: 1330 - protein, 15 aa, Homo sapiens
VDVVLGPIQLQTPPR

SEQ ID NO: 1331 - protein, 15 aa, Homo sapiens
VDVVLGPIQLQTPPR

SEQ ID NO: 1332 - protein, 15 aa, Homo sapiens
VDVVLGPIQLQTPPR

SEQ ID NO: 1333 - protein, 11 aa, Homo sapiens
GGVSPSSSASR

SEQ ID NO: 1334 - protein, 11 aa, Homo sapiens
LGFINWDAINK

SEQ ID NO: 1335 - protein, 14 aa, Homo sapiens
QVPGFGVADALGNR

SEQ ID NO: 1336 - protein, 14 aa, Homo sapiens
QVPGFGVADALGNR

SEQ ID NO: 1337 - protein, 14 aa, Homo sapiens
QVPGFGVADALGNR

SEQ ID NO: 1338 - protein, 14 aa, Homo sapiens
QVPGFGVADALGNR

SEQ ID NO: 1339 - protein, 17 aa, Homo sapiens
VGEAAHALGNTGHEIGR

SEQ ID NO: 1340 - protein, 17 aa, Homo sapiens
VGEAAHALGNTGHEIGR

SEQ ID NO: 1341 - protein, 17 aa, Homo sapiens
VGEAAHALGNTGHEIGR

SEQ ID NO: 1342 - protein, 17 aa, Homo sapiens
VGEAAHALGNTGHEIGR

SEQ ID NO: 1343 - protein, 10 aa, Homo sapiens
VSEALGQGTR

SEQ ID NO: 1344 - protein, 10 aa, Homo sapiens
VSEALGQGTR

SEQ ID NO: 1345 - protein, 10 aa, Homo sapiens
VSEALGQGTR

SEQ ID NO: 1346 - protein, 10 aa, Homo sapiens
VSEALGQGTR

SEQ ID NO: 1347 - protein, 14 aa, Homo sapiens
LGTFEVEDQIEAAR

SEQ ID NO: 1348 - protein, 14 aa, Homo sapiens
LGTFEVEDQIEAAR

SEQ ID NO: 1349 - protein, 14 aa, Homo sapiens
LGTFEVEDQIEAAR

SEQ ID NO: 1350 - protein, 14 aa, Homo sapiens
LGTFEVEDQIEAAR

SEQ ID NO: 1351 - protein, 10 aa, Homo sapiens
MLQNVQMPSK

SEQ ID NO: 1352 - protein, 10 aa, Homo sapiens
MLQNVQMPSK

SEQ ID NO: 1353 - protein, 10 aa, Homo sapiens
MLQNVQMPSK

SEQ ID NO: 1354 - protein, 10 aa, Homo sapiens
MLQNVQMPSK

SEQ ID NO: 1355 - protein, 11 aa, Homo sapiens
WEYYDSVYTER

SEQ ID NO: 1356 - protein, 11 aa, Homo sapiens
WEYYDSVYTER

SEQ ID NO: 1357 - protein, 11 aa, Homo sapiens
WEYYDSVYTER

SEQ ID NO: 1358 - protein, 11 aa, Homo sapiens
WEYYDSVYTER

SEQ ID NO: 1359 - protein, 10 aa, Homo sapiens
WISDHEYLYK

SEQ ID NO: 1360 - protein, 10 aa, Homo sapiens
WISDHEYLYK

SEQ ID NO: 1361 - protein, 10 aa, Homo sapiens
WISDHEYLYK

SEQ ID NO: 1362 - protein, 10 aa, Homo sapiens
WISDHEYLYK

SEQ ID NO: 1363 - protein, 10 aa, Homo sapiens
WISDHEYLYK

SEQ ID NO: 1364 - protein, 10 aa, Homo sapiens
WISDHEYLYK

SEQ ID NO: 1365 - protein, 10 aa, Homo sapiens
WISDHEYLYK

SEQ ID NO: 1366 - protein, 10 aa, Homo sapiens
WISDHEYLYK

SEQ ID NO: 1367 - protein, 15 aa, Homo sapiens
YMGLPTPEDNLDHYR

SEQ ID NO: 1368 - protein, 15 aa, Homo sapiens
YMGLPTPEDNLDHYR

SEQ ID NO: 1369 - protein, 15 aa, Homo sapiens
YMGLPTPEDNLDHYR

SEQ ID NO: 1370 - protein, 15 aa, Homo sapiens
YMGLPTPEDNLDHYR

SEQ ID NO: 1371 - protein, 15 aa, Homo sapiens
YMGLPTPEDNLDHYR

SEQ ID NO: 1372 - protein, 15 aa, Homo sapiens
YMGLPTPEDNLDHYR

SEQ ID NO: 1373 - protein, 11 aa, Homo sapiens
GNNVEKPLELR

SEQ ID NO: 1374 - protein, 21 aa, Homo sapiens
GQIIGNFQAFDEDTGLPAHAR

SEQ ID NO: 1375 - protein, 21 aa, Homo sapiens
GQIIGNFQAFDEDTGLPAHAR

SEQ ID NO: 1376 - protein, 21 aa, Homo sapiens
GQIIGNFQAFDEDTGLPAHAR

SEQ ID NO: 1377 - protein, 21 aa, Homo sapiens
GQIIGNFQAFDEDTGLPAHAR

SEQ ID NO: 1378 - protein, 14 aa, Homo sapiens
ILDVNDNIPVVENK

SEQ ID NO: 1379 - protein, 14 aa, Homo sapiens
ILDVNDNIPVVENK

SEQ ID NO: 1380 - protein, 14 aa, Homo sapiens
ILDVNDNIPVVENK

SEQ ID NO: 1381 - protein, 14 aa, Homo sapiens
ILDVNDNIPVVENK

SEQ ID NO: 1382 - protein, 11 aa, Homo sapiens
NLDFSVIVANK

SEQ ID NO: 1383 - protein, 11 aa, Homo sapiens
NLDFSVIVANK

SEQ ID NO: 1384 - protein, 11 aa, Homo sapiens
NLDFSVIVANK

SEQ ID NO: 1385 - protein, 11 aa, Homo sapiens
NLDFSVIVANK

SEQ ID NO: 1386 - protein, 24 aa, Homo sapiens
VYAPASTLVDQPYANEGTVVVTER

SEQ ID NO: 1387 - protein, 24 aa, Homo sapiens
VYAPASTLVDQPYANEGTVVVTER

SEQ ID NO: 1388 - protein, 24 aa, Homo sapiens
VYAPASTLVDQPYANEGTVVVTER

SEQ ID NO: 1389 - protein, 24 aa, Homo sapiens
VYAPASTLVDQPYANEGTVVVTER

SEQ ID NO: 1390 - protein, 10 aa, Homo sapiens
DFLLKPELLR

SEQ ID NO: 1391 - protein, 10 aa, Homo sapiens
DFLLKPELLR

SEQ ID NO: 1392 - protein, 10 aa, Homo sapiens
DFLLKPELLR

SEQ ID NO: 1393 - protein, 10 aa, Homo sapiens
DFLLKPELLR

SEQ ID NO: 1394 - protein, 22 aa, Homo sapiens
FEVNVAELPEEIDISTYIEQSR

SEQ ID NO: 1395 - protein, 22 aa, Homo sapiens
FEVNVAELPEEIDISTYIEQSR

SEQ ID NO: 1396 - protein, 22 aa, Homo sapiens
FEVNVAELPEEIDISTYIEQSR

SEQ ID NO: 1397 - protein, 22 aa, Homo sapiens
FEVNVAELPEEIDISTYIEQSR

SEQ ID NO: 1398 - protein, 14 aa, Homo sapiens
GLAITFVSDENDAK

SEQ ID NO: 1399 - protein, 8 aa, Homo sapiens
ILNDVQDR

SEQ ID NO: 1400 - protein, 8 aa, Homo sapiens
ILNDVQDR

SEQ ID NO: 1401 - protein, 8 aa, Homo sapiens
ILNDVQDR

SEQ ID NO: 1402 - protein, 8 aa, Homo sapiens
ILNDVQDR

SEQ ID NO: 1403 - protein, 6 aa, Homo sapiens
LTPHEK

SEQ ID NO: 1404 - protein, 6 aa, Homo sapiens
LTPHEK

SEQ ID NO: 1405 - protein, 6 aa, Homo sapiens
LTPHEK

SEQ ID NO: 1406 - protein, 6 aa, Homo sapiens
LTPHEK

SEQ ID NO: 1407 - protein, 10 aa, Homo sapiens
DFLLKPELLR

SEQ ID NO: 1408 - protein, 10 aa, Homo sapiens
DFLLKPELLR

SEQ ID NO: 1409 - protein, 10 aa, Homo sapiens
DFLLKPELLR

SEQ ID NO: 1410 - protein, 10 aa, Homo sapiens
DFLLKPELLR

SEQ ID NO: 1411 - protein, 8 aa, Homo sapiens
ELAFQISK

SEQ ID NO: 1412 - protein, 8 aa, Homo sapiens
ELAFQISK

SEQ ID NO: 1413 - protein, 8 aa, Homo sapiens
ELAFQISK

SEQ ID NO: 1414 - protein, 8 aa, Homo sapiens
ELAFQISK

SEQ ID NO: 1415 - protein, 22 aa, Homo sapiens
FEVNISELPDEIDISSYIEQTR

SEQ ID NO: 1416 - protein, 22 aa, Homo sapiens
FEVNISELPDEIDISSYIEQTR

SEQ ID NO: 1417 - protein, 22 aa, Homo sapiens
FEVNISELPDEIDISSYIEQTR

SEQ ID NO: 1418 - protein, 22 aa, Homo sapiens
FEVNISELPDEIDISSYIEQTR

SEQ ID NO: 1419 - protein, 14 aa, Homo sapiens
GLAITFVSDENDAK

SEQ ID NO: 1420 - protein, 8 aa, Homo sapiens
ILNDVQDR

SEQ ID NO: 1421 - protein, 8 aa, Homo sapiens
ILNDVQDR

SEQ ID NO: 1422 - protein, 8 aa, Homo sapiens
ILNDVQDR

SEQ ID NO: 1423 - protein, 8 aa, Homo sapiens
ILNDVQDR

SEQ ID NO: 1424 - protein, 9 aa, Homo sapiens
APEVILGAR

SEQ ID NO: 1425 - protein, 9 aa, Homo sapiens
APEVILGAR

SEQ ID NO: 1426 - protein, 9 aa, Homo sapiens
APEVILGAR

SEQ ID NO: 1427 - protein, 9 aa, Homo sapiens
APEVILGAR

SEQ ID NO: 1428 - protein, 15 aa, Homo sapiens
ASNAAAAAHTIGGSK

SEQ ID NO: 1429 - protein, 15 aa, Homo sapiens
ASNAAAAAHTIGGSK

SEQ ID NO: 1430 - protein, 15 aa, Homo sapiens
ASNAAAAAHTIGGSK

SEQ ID NO: 1431 - protein, 15 aa, Homo sapiens
ASNAAAAAHTIGGSK

SEQ ID NO: 1432 - protein, 14 aa, Homo sapiens
QLQASPGLGAGATR

SEQ ID NO: 1433 - protein, 14 aa, Homo sapiens
QLQASPGLGAGATR

SEQ ID NO: 1434 - protein, 14 aa, Homo sapiens
QLQASPGLGAGATR

SEQ ID NO: 1435 - protein, 14 aa, Homo sapiens
QLQASPGLGAGATR

SEQ ID NO: 1436 - protein, 17 aa, Homo sapiens
SGVGTGPPSPIALPPLR

SEQ ID NO: 1437 - protein, 17 aa, Homo sapiens
SGVGTGPPSPIALPPLR

SEQ ID NO: 1438 - protein, 17 aa, Homo sapiens
SGVGTGPPSPIALPPLR

SEQ ID NO: 1439 - protein, 17 aa, Homo sapiens
SGVGTGPPSPIALPPLR

SEQ ID NO: 1440 - protein, 9 aa, Homo sapiens
TGLPVVPER

SEQ ID NO: 1441 - protein, 9 aa, Homo sapiens
TGLPVVPER

SEQ ID NO: 1442 - protein, 9 aa, Homo sapiens
TGLPVVPER

SEQ ID NO: 1443 - protein, 9 aa, Homo sapiens
TGLPVVPER

SEQ ID NO: 1444 - protein, 22 aa, Homo sapiens
GQAAATLEQPASSSHAQGTHLR

SEQ ID NO: 1445 - protein, 22 aa, Homo sapiens
GQAAATLEQPASSSHAQGTHLR

SEQ ID NO: 1446 - protein, 22 aa, Homo sapiens
GQAAATLEQPASSSHAQGTHLR

SEQ ID NO: 1447 - protein, 22 aa, Homo sapiens
GQAAATLEQPASSSHAQGTHLR

SEQ ID NO: 1448 - protein, 11 aa, Homo sapiens
TGATTGELLQR

SEQ ID NO: 1449 - protein, 11 aa, Homo sapiens
TGATTGELLQR

SEQ ID NO: 1450 - protein, 11 aa, Homo sapiens
TGATTGELLQR

SEQ ID NO: 1451 - protein, 11 aa, Homo sapiens
TGATTGELLQR

SEQ ID NO: 1452 - protein, 12 aa, Homo sapiens
EHALLAYTLGVK

SEQ ID NO: 1453 - protein, 12 aa, Homo sapiens
EHALLAYTLGVK

SEQ ID NO: 1454 - protein, 12 aa, Homo sapiens
EHALLAYTLGVK

SEQ ID NO: 1455 - protein, 12 aa, Homo sapiens
EHALLAYTLGVK

SEQ ID NO: 1456 - protein, 11 aa, Homo sapiens
IGGIGTVPVGR

SEQ ID NO: 1457 - protein, 11 aa, Homo sapiens
IGGIGTVPVGR

SEQ ID NO: 1458 - protein, 11 aa, Homo sapiens
IGGIGTVPVGR

SEQ ID NO: 1459 - protein, 11 aa, Homo sapiens
IGGIGTVPVGR

SEQ ID NO: 1460 - protein, 8 aa, Homo sapiens
LPLQDVYK

SEQ ID NO: 1461 - protein, 8 aa, Homo sapiens
LPLQDVYK

SEQ ID NO: 1462 - protein, 8 aa, Homo sapiens
LPLQDVYK

SEQ ID NO: 1463 - protein, 8 aa, Homo sapiens
LPLQDVYK

SEQ ID NO: 1464 - protein, 11 aa, Homo sapiens
MDSTEPPYSQK

SEQ ID NO: 1465 - protein, 11 aa, Homo sapiens
MDSTEPPYSQK

SEQ ID NO: 1466 - protein, 11 aa, Homo sapiens
MDSTEPPYSQK

SEQ ID NO: 1467 - protein, 11 aa, Homo sapiens
MDSTEPPYSQK

SEQ ID NO: 1468 - protein, 9 aa, Homo sapiens
QTVAVGVIK

SEQ ID NO: 1469 - protein, 9 aa, Homo sapiens
QTVAVGVIK

SEQ ID NO: 1470 - protein, 9 aa, Homo sapiens
QTVAVGVIK

SEQ ID NO: 1471 - protein, 9 aa, Homo sapiens
QTVAVGVIK

SEQ ID NO: 1472 - protein, 10 aa, Homo sapiens
STTTGHLIYK

SEQ ID NO: 1473 - protein, 10 aa, Homo sapiens
STTTGHLIYK

SEQ ID NO: 1474 - protein, 10 aa, Homo sapiens
STTTGHLIYK

SEQ ID NO: 1475 - protein, 10 aa, Homo sapiens
STTTGHLIYK

SEQ ID NO: 1476 - protein, 15 aa, Homo sapiens
THINIVVIGHVDSGK

SEQ ID NO: 1477 - protein, 15 aa, Homo sapiens
THINIVVIGHVDSGK

SEQ ID NO: 1478 - protein, 15 aa, Homo sapiens
THINIVVIGHVDSGK

SEQ ID NO: 1479 - protein, 15 aa, Homo sapiens
THINIVVIGHVDSGK

SEQ ID NO: 1480 - protein, 24 aa, Homo sapiens
VETGVLKPGMVVTFAPVNVTTEVK

SEQ ID NO: 1481 - protein, 7 aa, Homo sapiens
YAWVLDK

SEQ ID NO: 1482 - protein, 7 aa, Homo sapiens
YAWVLDK

SEQ ID NO: 1483 - protein, 7 aa, Homo sapiens
YAWVLDK

SEQ ID NO: 1484 - protein, 7 aa, Homo sapiens
YAWVLDK

SEQ ID NO: 1485 - protein, 12 aa, Homo sapiens
YYVTIIDAPGHR

SEQ ID NO: 1486 - protein, 12 aa, Homo sapiens
YYVTIIDAPGHR

SEQ ID NO: 1487 - protein, 12 aa, Homo sapiens
YYVTIIDAPGHR

SEQ ID NO: 1488 - protein, 12 aa, Homo sapiens
YYVTIIDAPGHR

SEQ ID NO: 1489 - protein, 15 aa, Homo sapiens
FEEHVQSVDIAAFNK

SEQ ID NO: 1490 - protein, 12 aa, Homo sapiens
GVVQELQQAISK

SEQ ID NO: 1491 - protein, 12 aa, Homo sapiens
GVVQELQQAISK

SEQ ID NO: 1492 - protein, 12 aa, Homo sapiens
GVVQELQQAISK

SEQ ID NO: 1493 - protein, 12 aa, Homo sapiens
GVVQELQQAISK

SEQ ID NO: 1494 - protein, 6 aa, Homo sapiens
LNVLEK

SEQ ID NO: 1495 - protein, 6 aa, Homo sapiens
LNVLEK

SEQ ID NO: 1496 - protein, 6 aa, Homo sapiens
LNVLEK

SEQ ID NO: 1497 - protein, 6 aa, Homo sapiens
LNVLEK

SEQ ID NO: 1498 - protein, 13 aa, Homo sapiens
SIQLDGLVWGASK

SEQ ID NO: 1499 - protein, 13 aa, Homo sapiens
SIQLDGLVWGASK

SEQ ID NO: 1500 - protein, 13 aa, Homo sapiens
SIQLDGLVWGASK

SEQ ID NO: 1501 - protein, 13 aa, Homo sapiens
SIQLDGLVWGASK

SEQ ID NO: 1502 - protein, 12 aa, Homo sapiens
VGTDLLEEEITK

SEQ ID NO: 1503 - protein, 12 aa, Homo sapiens
VGTDLLEEEITK

SEQ ID NO: 1504 - protein, 12 aa, Homo sapiens
VGTDLLEEEITK

SEQ ID NO: 1505 - protein, 12 aa, Homo sapiens
VGTDLLEEEITK

SEQ ID NO: 1506 - protein, 12 aa, Homo sapiens
DSVVAGFQWATK

SEQ ID NO: 1507 - protein, 12 aa, Homo sapiens
DSVVAGFQWATK

SEQ ID NO: 1508 - protein, 12 aa, Homo sapiens
DSVVAGFQWATK

SEQ ID NO: 1509 - protein, 12 aa, Homo sapiens
DSVVAGFQWATK

SEQ ID NO: 1510 - protein, 12 aa, Homo sapiens
EGIPALDNFLDK

SEQ ID NO: 1511 - protein, 12 aa, Homo sapiens
EGIPALDNFLDK

SEQ ID NO: 1512 - protein, 12 aa, Homo sapiens
EGIPALDNFLDK

SEQ ID NO: 1513 - protein, 12 aa, Homo sapiens
EGIPALDNFLDK

SEQ ID NO: 1514 - protein, 8 aa, Homo sapiens
FSVSPVVR

SEQ ID NO: 1515 - protein, 8 aa, Homo sapiens
FSVSPVVR

SEQ ID NO: 1516 - protein, 8 aa, Homo sapiens
FSVSPVVR

SEQ ID NO: 1517 - protein, 8 aa, Homo sapiens
FSVSPVVR

SEQ ID NO: 1518 - protein, 10 aa, Homo sapiens
GEGQLGPAER

SEQ ID NO: 1519 - protein, 9 aa, Homo sapiens
GVQYLNEIK

SEQ ID NO: 1520 - protein, 9 aa, Homo sapiens
GVQYLNEIK

SEQ ID NO: 1521 - protein, 9 aa, Homo sapiens
GVQYLNEIK

SEQ ID NO: 1522 - protein, 9 aa, Homo sapiens
GVQYLNEIK

SEQ ID NO: 1523 - protein, 14 aa, Homo sapiens
FIFWSSEVAGSLYR

SEQ ID NO: 1524 - protein, 14 aa, Homo sapiens
FIFWSSEVAGSLYR

SEQ ID NO: 1525 - protein, 14 aa, Homo sapiens
FIFWSSEVAGSLYR

SEQ ID NO: 1526 - protein, 14 aa, Homo sapiens
FIFWSSEVAGSLYR

SEQ ID NO: 1527 - protein, 14 aa, Homo sapiens
INLHSSFVPLGELK

SEQ ID NO: 1528 - protein, 14 aa, Homo sapiens
INLHSSFVPLGELK

SEQ ID NO: 1529 - protein, 14 aa, Homo sapiens
INLHSSFVPLGELK

SEQ ID NO: 1530 - protein, 14 aa, Homo sapiens
INLHSSFVPLGELK

SEQ ID NO: 1531 - protein, 22 aa, Homo sapiens
LVIASSDLIWPSGITIDFLTDK

SEQ ID NO: 1532 - protein, 11 aa, Homo sapiens
NQVTPLDILSK

SEQ ID NO: 1533 - protein, 11 aa, Homo sapiens
NQVTPLDILSK

SEQ ID NO: 1534 - protein, 11 aa, Homo sapiens
NQVTPLDILSK

SEQ ID NO: 1535 - protein, 11 aa, Homo sapiens
NQVTPLDILSK

SEQ ID NO: 1536 - protein, 12 aa, Homo sapiens
YPANVAVDPVER

SEQ ID NO: 1537 - protein, 12 aa, Homo sapiens
YPANVAVDPVER

SEQ ID NO: 1538 - protein, 12 aa, Homo sapiens
YPANVAVDPVER

SEQ ID NO: 1539 - protein, 12 aa, Homo sapiens
YPANVAVDPVER

SEQ ID NO: 1540 - protein, 11 aa, Homo sapiens
EDDFDWNPADR

SEQ ID NO: 1541 - protein, 11 aa, Homo sapiens
EDDFDWNPADR

SEQ ID NO: 1542 - protein, 11 aa, Homo sapiens
EDDFDWNPADR

SEQ ID NO: 1543 - protein, 11 aa, Homo sapiens
EDDFDWNPADR

SEQ ID NO: 1544 - protein, 7 aa, Homo sapiens
GDVFFPK

SEQ ID NO: 1545 - protein, 7 aa, Homo sapiens
GDVFFPK

SEQ ID NO: 1546 - protein, 7 aa, Homo sapiens
GDVFFPK

SEQ ID NO: 1547 - protein, 7 aa, Homo sapiens
GDVFFPK

SEQ ID NO: 1548 - protein, 11 aa, Homo sapiens
IQLYQGTDATK

SEQ ID NO: 1549 - protein, 11 aa, Homo sapiens
IQLYQGTDATK

SEQ ID NO: 1550 - protein, 11 aa, Homo sapiens
IQLYQGTDATK

SEQ ID NO: 1551 - protein, 11 aa, Homo sapiens
IQLYQGTDATK

SEQ ID NO: 1552 - protein, 10 aa, Homo sapiens
NSNNALAWEK

SEQ ID NO: 1553 - protein, 10 aa, Homo sapiens
NSNNALAWEK

SEQ ID NO: 1554 - protein, 10 aa, Homo sapiens
NSNNALAWEK

SEQ ID NO: 1555 - protein, 10 aa, Homo sapiens
NSNNALAWEK

SEQ ID NO: 1556 - protein, 14 aa, Homo sapiens
VNLQPFNYEEIVSR

SEQ ID NO: 1557 - protein, 14 aa, Homo sapiens
VNLQPFNYEEIVSR

SEQ ID NO: 1558 - protein, 14 aa, Homo sapiens
VNLQPFNYEEIVSR

SEQ ID NO: 1559 - protein, 14 aa, Homo sapiens
VNLQPFNYEEIVSR

SEQ ID NO: 1560 - protein, 7 aa, Homo sapiens
AVEHINK

SEQ ID NO: 1561 - protein, 7 aa, Homo sapiens
AVEHINK

SEQ ID NO: 1562 - protein, 7 aa, Homo sapiens
AVEHINK

SEQ ID NO: 1563 - protein, 7 aa, Homo sapiens
AVEHINK

SEQ ID NO: 1564 - protein, 13 aa, Homo sapiens
GNPTVEVDLFTSK

SEQ ID NO: 1565 - protein, 13 aa, Homo sapiens
GNPTVEVDLFTSK

SEQ ID NO: 1566 - protein, 13 aa, Homo sapiens
GNPTVEVDLFTSK

SEQ ID NO: 1567 - protein, 13 aa, Homo sapiens
GNPTVEVDLFTSK

SEQ ID NO: 1568 - protein, 10 aa, Homo sapiens
IGAEVYHNLK

SEQ ID NO: 1569 - protein, 10 aa, Homo sapiens
IGAEVYHNLK

SEQ ID NO: 1570 - protein, 10 aa, Homo sapiens
IGAEVYHNLK

SEQ ID NO: 1571 - protein, 10 aa, Homo sapiens
IGAEVYHNLK

SEQ ID NO: 1572 - protein, 12 aa, Homo sapiens
YISPDQLADLYK

SEQ ID NO: 1573 - protein, 12 aa, Homo sapiens
YISPDQLADLYK

SEQ ID NO: 1574 - protein, 12 aa, Homo sapiens
YISPDQLADLYK

SEQ ID NO: 1575 - protein, 12 aa, Homo sapiens
YISPDQLADLYK

SEQ ID NO: 1576 - protein, 6 aa, Homo sapiens
YNQLLR

SEQ ID NO: 1577 - protein, 6 aa, Homo sapiens
YNQLLR

SEQ ID NO: 1578 - protein, 6 aa, Homo sapiens
YNQLLR

SEQ ID NO: 1579 - protein, 6 aa, Homo sapiens
YNQLLR

SEQ ID NO: 1580 - protein, 26 aa, Homo sapiens
DATNVGDEGGFAPNILENSEALELVK

SEQ ID NO: 1581 - protein, 13 aa, Homo sapiens
GNPTVEVDLYTAK

SEQ ID NO: 1582 - protein, 13 aa, Homo sapiens
GNPTVEVDLYTAK

SEQ ID NO: 1583 - protein, 10 aa, Homo sapiens
IEEELGDEAR

SEQ ID NO: 1584 - protein, 10 aa, Homo sapiens
IEEELGDEAR

SEQ ID NO: 1585 - protein, 10 aa, Homo sapiens
IEEELGDEAR

SEQ ID NO: 1586 - protein, 10 aa, Homo sapiens
IEEELGDEAR

SEQ ID NO: 1587 - protein, 10 aa, Homo sapiens
LGAEVYHTLK

SEQ ID NO: 1588 - protein, 10 aa, Homo sapiens
LGAEVYHTLK

SEQ ID NO: 1589 - protein, 10 aa, Homo sapiens
LGAEVYHTLK

SEQ ID NO: 1590 - protein, 10 aa, Homo sapiens
LGAEVYHTLK

SEQ ID NO: 1591 - protein, 16 aa, Homo sapiens
YITGDQLGALYQDFVR

SEQ ID NO: 1592 - protein, 16 aa, Homo sapiens
YITGDQLGALYQDFVR

SEQ ID NO: 1593 - protein, 16 aa, Homo sapiens
YITGDQLGALYQDFVR

SEQ ID NO: 1594 - protein, 16 aa, Homo sapiens
YITGDQLGALYQDFVR

SEQ ID NO: 1595 - protein, 8 aa, Homo sapiens
ALYLSGYR

SEQ ID NO: 1596 - protein, 15 aa, Homo sapiens
ETEESALVSQAEALK

SEQ ID NO: 1597 - protein, 15 aa, Homo sapiens
ETEESALVSQAEALK

SEQ ID NO: 1598 - protein, 15 aa, Homo sapiens
ETEESALVSQAEALK

SEQ ID NO: 1599 - protein, 15 aa, Homo sapiens
ETEESALVSQAEALK

SEQ ID NO: 1600 - protein, 14 aa, Homo sapiens
FSEAVQTLLTWIER

SEQ ID NO: 1601 - protein, 14 aa, Homo sapiens
FSEAVQTLLTWIER

SEQ ID NO: 1602 - protein, 14 aa, Homo sapiens
FSEAVQTLLTWIER

SEQ ID NO: 1603 - protein, 14 aa, Homo sapiens
FSEAVQTLLTWIER

SEQ ID NO: 1604 - protein, 22 aa, Homo sapiens
QALSGILIQFEQIVAVYHSASK

SEQ ID NO: 1605 - protein, 22 aa, Homo sapiens
QALSGILIQFEQIVAVYHSASK

SEQ ID NO: 1606 - protein, 22 aa, Homo sapiens
QALSGILIQFEQIVAVYHSASK

SEQ ID NO: 1607 - protein, 22 aa, Homo sapiens
QALSGILIQFEQIVAVYHSASK

SEQ ID NO: 1608 - protein, 15 aa, Homo sapiens
WLWVYEIGYAADNSR

SEQ ID NO: 1609 - protein, 15 aa, Homo sapiens
WLWVYEIGYAADNSR

SEQ ID NO: 1610 - protein, 15 aa, Homo sapiens
WLWVYEIGYAADNSR

SEQ ID NO: 1611 - protein, 15 aa, Homo sapiens
WLWVYEIGYAADNSR

SEQ ID NO: 1612 - protein, 8 aa, Homo sapiens
EVEEDEYK

SEQ ID NO: 1613 - protein, 8 aa, Homo sapiens
EVEEDEYK

SEQ ID NO: 1614 - protein, 8 aa, Homo sapiens
EVEEDEYK

SEQ ID NO: 1615 - protein, 8 aa, Homo sapiens
EVEEDEYK

SEQ ID NO: 1616 - protein, 19 aa, Homo sapiens
LISLTDENALSGNEELTVK

SEQ ID NO: 1617 - protein, 9 aa, Homo sapiens
SGTSEFLNK

SEQ ID NO: 1618 - protein, 9 aa, Homo sapiens
SGTSEFLNK

SEQ ID NO: 1619 - protein, 9 aa, Homo sapiens
SGTSEFLNK

SEQ ID NO: 1620 - protein, 9 aa, Homo sapiens
SGTSEFLNK

SEQ ID NO: 1621 - protein, 9 aa, Homo sapiens
SGYLLPDTK

SEQ ID NO: 1622 - protein, 9 aa, Homo sapiens
SGYLLPDTK

SEQ ID NO: 1623 - protein, 9 aa, Homo sapiens
SGYLLPDTK

SEQ ID NO: 1624 - protein, 9 aa, Homo sapiens
SGYLLPDTK

SEQ ID NO: 1625 - protein, 8 aa, Homo sapiens
TDDEVVQR

SEQ ID NO: 1626 - protein, 8 aa, Homo sapiens
TDDEVVQR

SEQ ID NO: 1627 - protein, 8 aa, Homo sapiens
TDDEVVQR

SEQ ID NO: 1628 - protein, 8 aa, Homo sapiens
TDDEVVQR

SEQ ID NO: 1629 - protein, 13 aa, Homo sapiens
RPHFDQLVAAFDK

SEQ ID NO: 1630 - protein, 13 aa, Homo sapiens
RPHFDQLVAAFDK

SEQ ID NO: 1631 - protein, 13 aa, Homo sapiens
RPHFDQLVAAFDK

SEQ ID NO: 1632 - protein, 13 aa, Homo sapiens
RPHFDQLVAAFDK

SEQ ID NO: 1633 - protein, 8 aa, Homo sapiens
SFGPLTQR

SEQ ID NO: 1634 - protein, 8 aa, Homo sapiens
SFGPLTQR

SEQ ID NO: 1635 - protein, 8 aa, Homo sapiens
SFGPLTQR

SEQ ID NO: 1636 - protein, 8 aa, Homo sapiens
SFGPLTQR

SEQ ID NO: 1637 - protein, 35 aa, Homo sapiens
VDTIAADESFPSSSSSSSSSSSAAWAVGPHGAGQR

SEQ ID NO: 1638 - protein, 18 aa, Homo sapiens
VYFQTLPQGELSSQLPER

SEQ ID NO: 1639 - protein, 18 aa, Homo sapiens
VYFQTLPQGELSSQLPER

SEQ ID NO: 1640 - protein, 18 aa, Homo sapiens
VYFQTLPQGELSSQLPER

SEQ ID NO: 1641 - protein, 18 aa, Homo sapiens
VYFQTLPQGELSSQLPER

SEQ ID NO: 1642 - protein, 11 aa, Homo sapiens
WAAPEVIAHGK

SEQ ID NO: 1643 - protein, 11 aa, Homo sapiens
WAAPEVIAHGK

SEQ ID NO: 1644 - protein, 11 aa, Homo sapiens
WAAPEVIAHGK

SEQ ID NO: 1645 - protein, 11 aa, Homo sapiens
WAAPEVIAHGK

SEQ ID NO: 1646 - protein, 20 aa, Homo sapiens
IWPGIPSPESEFEGLFTTHK

SEQ ID NO: 1647 - protein, 20 aa, Homo sapiens
IWPGIPSPESEFEGLFTTHK

SEQ ID NO: 1648 - protein, 20 aa, Homo sapiens
IWPGIPSPESEFEGLFTTHK

SEQ ID NO: 1649 - protein, 20 aa, Homo sapiens
IWPGIPSPESEFEGLFTTHK

SEQ ID NO: 1650 - protein, 11 aa, Homo sapiens
LADESGHVVLR

SEQ ID NO: 1651 - protein, 11 aa, Homo sapiens
LADESGHVVLR

SEQ ID NO: 1652 - protein, 11 aa, Homo sapiens
LADESGHVVLR

SEQ ID NO: 1653 - protein, 11 aa, Homo sapiens
LADESGHVVLR

SEQ ID NO: 1654 - protein, 19 aa, Homo sapiens
VIHINEVVLLDAPVGLVAR

SEQ ID NO: 1655 - protein, 19 aa, Homo sapiens
VIHINEVVLLDAPVGLVAR

SEQ ID NO: 1656 - protein, 19 aa, Homo sapiens
VIHINEVVLLDAPVGLVAR

SEQ ID NO: 1657 - protein, 19 aa, Homo sapiens
VIHINEVVLLDAPVGLVAR

SEQ ID NO: 1658 - protein, 9 aa, Homo sapiens
VTAASGAPR

SEQ ID NO: 1659 - protein, 9 aa, Homo sapiens
VTAASGAPR

SEQ ID NO: 1660 - protein, 16 aa, Homo sapiens
YEVDVSAGNGAGSVQR

SEQ ID NO: 1661 - protein, 16 aa, Homo sapiens
YEVDVSAGNGAGSVQR

SEQ ID NO: 1662 - protein, 16 aa, Homo sapiens
YEVDVSAGNGAGSVQR

SEQ ID NO: 1663 - protein, 16 aa, Homo sapiens
YEVDVSAGNGAGSVQR

SEQ ID NO: 1664 - protein, 17 aa, Homo sapiens
GALGPQLLLNWGVQIAK

SEQ ID NO: 1665 - protein, 12 aa, Homo sapiens
GESIEPLDPSEK

SEQ ID NO: 1666 - protein, 12 aa, Homo sapiens
GESIEPLDPSEK

SEQ ID NO: 1667 - protein, 12 aa, Homo sapiens
GESIEPLDPSEK

SEQ ID NO: 1668 - protein, 12 aa, Homo sapiens
GESIEPLDPSEK

SEQ ID NO: 1669 - protein, 10 aa, Homo sapiens
LAEVPDLLEK

SEQ ID NO: 1670 - protein, 10 aa, Homo sapiens
LAEVPDLLEK

SEQ ID NO: 1671 - protein, 10 aa, Homo sapiens
LAEVPDLLEK

SEQ ID NO: 1672 - protein, 10 aa, Homo sapiens
LAEVPDLLEK

SEQ ID NO: 1673 - protein, 18 aa, Homo sapiens
SLEATDSAFDNPDYWHSR

SEQ ID NO: 1674 - protein, 18 aa, Homo sapiens
SLEATDSAFDNPDYWHSR

SEQ ID NO: 1675 - protein, 18 aa, Homo sapiens
SLEATDSAFDNPDYWHSR

SEQ ID NO: 1676 - protein, 18 aa, Homo sapiens
SLEATDSAFDNPDYWHSR

SEQ ID NO: 1677 - protein, 21 aa, Homo sapiens
SPSQVQVADFGVADLLPPDDK

SEQ ID NO: 1678 - protein, 21 aa, Homo sapiens
SPSQVQVADFGVADLLPPDDK

SEQ ID NO: 1679 - protein, 21 aa, Homo sapiens
SPSQVQVADFGVADLLPPDDK

SEQ ID NO: 1680 - protein, 21 aa, Homo sapiens
SPSQVQVADFGVADLLPPDDK

SEQ ID NO: 1681 - protein, 8 aa, Homo sapiens
VAQVSITK

SEQ ID NO: 1682 - protein, 8 aa, Homo sapiens
VAQVSITK

SEQ ID NO: 1683 - protein, 8 aa, Homo sapiens
VAQVSITK

SEQ ID NO: 1684 - protein, 8 aa, Homo sapiens
VAQVSITK

SEQ ID NO: 1685 - protein, 11 aa, Homo sapiens
VTSGDPELPQV

SEQ ID NO: 1686 - protein, 11 aa, Homo sapiens
VTSGDPELPQV

SEQ ID NO: 1687 - protein, 11 aa, Homo sapiens
VTSGDPELPQV

SEQ ID NO: 1688 - protein, 11 aa, Homo sapiens
VTSGDPELPQV

SEQ ID NO: 1689 - protein, 7 aa, Homo sapiens
AVLQWTK

SEQ ID NO: 1690 - protein, 7 aa, Homo sapiens
AVLQWTK

SEQ ID NO: 1691 - protein, 7 aa, Homo sapiens
AVLQWTK

SEQ ID NO: 1692 - protein, 7 aa, Homo sapiens
AVLQWTK

SEQ ID NO: 1693 - protein, 14 aa, Homo sapiens
LGAVDESLSEETQK

SEQ ID NO: 1694 - protein, 14 aa, Homo sapiens
LGAVDESLSEETQK

SEQ ID NO: 1695 - protein, 14 aa, Homo sapiens
LGAVDESLSEETQK

SEQ ID NO: 1696 - protein, 14 aa, Homo sapiens
LGAVDESLSEETQK

SEQ ID NO: 1697 - protein, 8 aa, Homo sapiens
LLESDYFR

SEQ ID NO: 1698 - protein, 8 aa, Homo sapiens
LLESDYFR

SEQ ID NO: 1699 - protein, 8 aa, Homo sapiens
LLESDYFR

SEQ ID NO: 1700 - protein, 8 aa, Homo sapiens
LLESDYFR

SEQ ID NO: 1701 - protein, 7 aa, Homo sapiens
NLLQNIH

SEQ ID NO: 1702 - protein, 7 aa, Homo sapiens
NLLQNIH

SEQ ID NO: 1703 - protein, 7 aa, Homo sapiens
NLLQNIH

SEQ ID NO: 1704 - protein, 7 aa, Homo sapiens
NLLQNIH

SEQ ID NO: 1705 - protein, 17 aa, Homo sapiens
VLPFFERPDFQLFTGNK

SEQ ID NO: 1706 - protein, 17 aa, Homo sapiens
VLPFFERPDFQLFTGNK

SEQ ID NO: 1707 - protein, 17 aa, Homo sapiens
VLPFFERPDFQLFTGNK

SEQ ID NO: 1708 - protein, 17 aa, Homo sapiens
VLPFFERPDFQLFTGNK

SEQ ID NO: 1709 - protein, 10 aa, Homo sapiens
FPFFQYSVTK

SEQ ID NO: 1710 - protein, 10 aa, Homo sapiens
FPFFQYSVTK

SEQ ID NO: 1711 - protein, 10 aa, Homo sapiens
FPFFQYSVTK

SEQ ID NO: 1712 - protein, 10 aa, Homo sapiens
FPFFQYSVTK

SEQ ID NO: 1713 - protein, 8 aa, Homo sapiens
EAQDDLVK

SEQ ID NO: 1714 - protein, 8 aa, Homo sapiens
EAQDDLVK

SEQ ID NO: 1715 - protein, 8 aa, Homo sapiens
EAQDDLVK

SEQ ID NO: 1716 - protein, 8 aa, Homo sapiens
ELSEQIQR

SEQ ID NO: 1717 - protein, 8 aa, Homo sapiens
ELSEQIQR

SEQ ID NO: 1718 - protein, 8 aa, Homo sapiens
ELSEQIQR

SEQ ID NO: 1719 - protein, 8 aa, Homo sapiens
ELSEQIQR

SEQ ID NO: 1720 - protein, 9 aa, Homo sapiens
IQVWHAEHR

SEQ ID NO: 1721 - protein, 9 aa, Homo sapiens
IQVWHAEHR

SEQ ID NO: 1722 - protein, 9 aa, Homo sapiens
IQVWHAEHR

SEQ ID NO: 1723 - protein, 9 aa, Homo sapiens
IQVWHAEHR

SEQ ID NO: 1724 - protein, 7 aa, Homo sapiens
LQDYEEK

SEQ ID NO: 1725 - protein, 7 aa, Homo sapiens
LQDYEEK

SEQ ID NO: 1726 - protein, 7 aa, Homo sapiens
LQDYEEK

SEQ ID NO: 1727 - protein, 7 aa, Homo sapiens
LQDYEEK

SEQ ID NO: 1728 - protein, 8 aa, Homo sapiens
SGYLSSER

SEQ ID NO: 1729 - protein, 8 aa, Homo sapiens
SGYLSSER

SEQ ID NO: 1730 - protein, 8 aa, Homo sapiens
SGYLSSER

SEQ ID NO: 1731 - protein, 8 aa, Homo sapiens
SGYLSSER

SEQ ID NO: 1732 - protein, 15 aa, Homo sapiens
ADEPSSEESDLEIDK

SEQ ID NO: 1733 - protein, 15 aa, Homo sapiens
ADEPSSEESDLEIDK

SEQ ID NO: 1734 - protein, 15 aa, Homo sapiens
ADEPSSEESDLEIDK

SEQ ID NO: 1735 - protein, 15 aa, Homo sapiens
ADEPSSEESDLEIDK

SEQ ID NO: 1736 - protein, 10 aa, Homo sapiens
AIDLFTDAIK

SEQ ID NO: 1737 - protein, 10 aa, Homo sapiens
AIDLFTDAIK

SEQ ID NO: 1738 - protein, 10 aa, Homo sapiens
AIDLFTDAIK

SEQ ID NO: 1739 - protein, 10 aa, Homo sapiens
AIDLFTDAIK

SEQ ID NO: 1740 - protein, 13 aa, Homo sapiens
AIEINPDSAQPYK

SEQ ID NO: 1741 - protein, 13 aa, Homo sapiens
AIEINPDSAQPYK

SEQ ID NO: 1742 - protein, 13 aa, Homo sapiens
AIEINPDSAQPYK

SEQ ID NO: 1743 - protein, 13 aa, Homo sapiens
AIEINPDSAQPYK

SEQ ID NO: 1744 - protein, 9 aa, Homo sapiens
LQKPNAAIR

SEQ ID NO: 1745 - protein, 9 aa, Homo sapiens
LQKPNAAIR

SEQ ID NO: 1746 - protein, 9 aa, Homo sapiens
LQKPNAAIR

SEQ ID NO: 1747 - protein, 9 aa, Homo sapiens
LQKPNAAIR

SEQ ID NO: 1748 - protein, 6 aa, Homo sapiens
YQSNPK

SEQ ID NO: 1749 - protein, 6 aa, Homo sapiens
YQSNPK

SEQ ID NO: 1750 - protein, 6 aa, Homo sapiens
YQSNPK

SEQ ID NO: 1751 - protein, 6 aa, Homo sapiens
YQSNPK

SEQ ID NO: 1752 - protein, 10 aa, Homo sapiens
GINVALANGK

SEQ ID NO: 1753 - protein, 10 aa, Homo sapiens
GINVALANGK

SEQ ID NO: 1754 - protein, 10 aa, Homo sapiens
GINVALANGK

SEQ ID NO: 1755 - protein, 10 aa, Homo sapiens
GINVALANGK

SEQ ID NO: 1756 - protein, 22 aa, Homo sapiens
LVVAVAVFLLTFYVISQVFEIK

SEQ ID NO: 1757 - protein, 8 aa, Homo sapiens
SALDTAAR

SEQ ID NO: 1758 - protein, 8 aa, Homo sapiens
SALDTAAR

SEQ ID NO: 1759 - protein, 8 aa, Homo sapiens
SALDTAAR

SEQ ID NO: 1760 - protein, 8 aa, Homo sapiens
SALDTAAR

SEQ ID NO: 1761 - protein, 8 aa, Homo sapiens
SPFEQHIK

SEQ ID NO: 1762 - protein, 8 aa, Homo sapiens
SPFEQHIK

SEQ ID NO: 1763 - protein, 8 aa, Homo sapiens
SPFEQHIK

SEQ ID NO: 1764 - protein, 8 aa, Homo sapiens
SPFEQHIK

SEQ ID NO: 1765 - protein, 8 aa, Homo sapiens
TGEVLDTK

SEQ ID NO: 1766 - protein, 8 aa, Homo sapiens
TGEVLDTK

SEQ ID NO: 1767 - protein, 8 aa, Homo sapiens
TGEVLDTK

SEQ ID NO: 1768 - protein, 8 aa, Homo sapiens
TGEVLDTK

SEQ ID NO: 1769 - protein, 17 aa, Homo sapiens
GNAGQSNYGFANSAMER

SEQ ID NO: 1770 - protein, 17 aa, Homo sapiens
GNAGQSNYGFANSAMER

SEQ ID NO: 1771 - protein, 17 aa, Homo sapiens
GNAGQSNYGFANSAMER

SEQ ID NO: 1772 - protein, 17 aa, Homo sapiens
GNAGQSNYGFANSAMER

SEQ ID NO: 1773 - protein, 17 aa, Homo sapiens
LPEDPLLSGLLDSPALK

SEQ ID NO: 1774 - protein, 17 aa, Homo sapiens
LPEDPLLSGLLDSPALK

SEQ ID NO: 1775 - protein, 17 aa, Homo sapiens
LPEDPLLSGLLDSPALK

SEQ ID NO: 1776 - protein, 17 aa, Homo sapiens
LPEDPLLSGLLDSPALK

SEQ ID NO: 1777 - protein, 11 aa, Homo sapiens
LQVVDQPLPVR

SEQ ID NO: 1778 - protein, 11 aa, Homo sapiens
LQVVDQPLPVR

SEQ ID NO: 1779 - protein, 11 aa, Homo sapiens
LQVVDQPLPVR

SEQ ID NO: 1780 - protein, 11 aa, Homo sapiens
LQVVDQPLPVR

SEQ ID NO: 1781 - protein, 13 aa, Homo sapiens
MVVPGLDGAQIPR

SEQ ID NO: 1782 - protein, 13 aa, Homo sapiens
MVVPGLDGAQIPR

SEQ ID NO: 1783 - protein, 13 aa, Homo sapiens
MVVPGLDGAQIPR

SEQ ID NO: 1784 - protein, 13 aa, Homo sapiens
MVVPGLDGAQIPR

SEQ ID NO: 1785 - protein, 11 aa, Homo sapiens
SEGVVAVLLTK

SEQ ID NO: 1786 - protein, 11 aa, Homo sapiens
SEGVVAVLLTK

SEQ ID NO: 1787 - protein, 11 aa, Homo sapiens
SEGVVAVLLTK

SEQ ID NO: 1788 - protein, 11 aa, Homo sapiens
SEGVVAVLLTK

SEQ ID NO: 1789 - protein, 9 aa, Homo sapiens
VLEALLPLK

SEQ ID NO: 1790 - protein, 9 aa, Homo sapiens
VLEALLPLK

SEQ ID NO: 1791 - protein, 9 aa, Homo sapiens
VLEALLPLK

SEQ ID NO: 1792 - protein, 9 aa, Homo sapiens
VLEALLPLK

SEQ ID NO: 1793 - protein, 10 aa, Homo sapiens
GWLLLQVSSR

SEQ ID NO: 1794 - protein, 7 aa, Homo sapiens
HLEEELK

SEQ ID NO: 1795 - protein, 7 aa, Homo sapiens
HLEEELK

SEQ ID NO: 1796 - protein, 7 aa, Homo sapiens
HLEEELK

SEQ ID NO: 1797 - protein, 7 aa, Homo sapiens
HLEEELK

SEQ ID NO: 1798 - protein, 9 aa, Homo sapiens
LVYNVLYYR

SEQ ID NO: 1799 - protein, 9 aa, Homo sapiens
LVYNVLYYR

SEQ ID NO: 1800 - protein, 9 aa, Homo sapiens
LVYNVLYYR

SEQ ID NO: 1801 - protein, 9 aa, Homo sapiens
LVYNVLYYR

SEQ ID NO: 1802 - protein, 11 aa, Homo sapiens
VFTEGEPLALR

SEQ ID NO: 1803 - protein, 11 aa, Homo sapiens
VFTEGEPLALR

SEQ ID NO: 1804 - protein, 11 aa, Homo sapiens
VFTEGEPLALR

SEQ ID NO: 1805 - protein, 11 aa, Homo sapiens
VFTEGEPLALR

SEQ ID NO: 1806 - protein, 11 aa, Homo sapiens
YTSAGISVTVK

SEQ ID NO: 1807 - protein, 11 aa, Homo sapiens
YTSAGISVTVK

SEQ ID NO: 1808 - protein, 11 aa, Homo sapiens
YTSAGISVTVK

SEQ ID NO: 1809 - protein, 11 aa, Homo sapiens
YTSAGISVTVK

SEQ ID NO: 1810 - protein, 19 aa, Homo sapiens
IEENGYNTYASFNWQHNGR

SEQ ID NO: 1811 - protein, 19 aa, Homo sapiens
IEENGYNTYASFNWQHNGR

SEQ ID NO: 1812 - protein, 19 aa, Homo sapiens
IEENGYNTYASFNWQHNGR

SEQ ID NO: 1813 - protein, 19 aa, Homo sapiens
IEENGYNTYASFNWQHNGR

SEQ ID NO: 1814 - protein, 10 aa, Homo sapiens
SYNHLQGDVR

SEQ ID NO: 1815 - protein, 10 aa, Homo sapiens
SYNHLQGDVR

SEQ ID NO: 1816 - protein, 10 aa, Homo sapiens
SYNHLQGDVR

SEQ ID NO: 1817 - protein, 10 aa, Homo sapiens
SYNHLQGDVR

SEQ ID NO: 1818 - protein, 10 aa, Homo sapiens
LESNNYNTYR

SEQ ID NO: 1819 - protein, 10 aa, Homo sapiens
LESNNYNTYR

SEQ ID NO: 1820 - protein, 10 aa, Homo sapiens
LESNNYNTYR

SEQ ID NO: 1821 - protein, 10 aa, Homo sapiens
LESNNYNTYR

SEQ ID NO: 1822 - protein, 8 aa, Homo sapiens
LQLQAEER

SEQ ID NO: 1823 - protein, 8 aa, Homo sapiens
LQLQAEER

SEQ ID NO: 1824 - protein, 8 aa, Homo sapiens
LQLQAEER

SEQ ID NO: 1825 - protein, 8 aa, Homo sapiens
LQLQAEER

SEQ ID NO: 1826 - protein, 7 aa, Homo sapiens
NGGFFLR

SEQ ID NO: 1827 - protein, 7 aa, Homo sapiens
NGGFFLR

SEQ ID NO: 1828 - protein, 7 aa, Homo sapiens
NGGFFLR

SEQ ID NO: 1829 - protein, 7 aa, Homo sapiens
NGGFFLR

SEQ ID NO: 1830 - protein, 15 aa, Homo sapiens
ELILENHYNTYASAK

SEQ ID NO: 1831 - protein, 15 aa, Homo sapiens
ELILENHYNTYASAK

SEQ ID NO: 1832 - protein, 15 aa, Homo sapiens
ELILENHYNTYASAK

SEQ ID NO: 1833 - protein, 15 aa, Homo sapiens
ELILENHYNTYASAK

SEQ ID NO: 1834 - protein, 6 aa, Homo sapiens
TQWYLR

SEQ ID NO: 1835 - protein, 10 aa, Homo sapiens
TVAVGIVAIK

SEQ ID NO: 1836 - protein, 13 aa, Homo sapiens
WILTWILPTLLYR

SEQ ID NO: 1837 - protein, 13 aa, Homo sapiens
WILTWILPTLLYR

SEQ ID NO: 1838 - protein, 13 aa, Homo sapiens
WILTWILPTLLYR

SEQ ID NO: 1839 - protein, 13 aa, Homo sapiens
WILTWILPTLLYR

SEQ ID NO: 1840 - protein, 17 aa, Homo sapiens
EQFEENWYNTYSSNLYK

SEQ ID NO: 1841 - protein, 17 aa, Homo sapiens
EQFEENWYNTYSSNLYK

SEQ ID NO: 1842 - protein, 17 aa, Homo sapiens
EQFEENWYNTYSSNLYK

SEQ ID NO: 1843 - protein, 17 aa, Homo sapiens
EQFEENWYNTYSSNLYK

SEQ ID NO: 1844 - protein, 17 aa, Homo sapiens
FGILEFISIAVGLVSIR

SEQ ID NO: 1845 - protein, 13 aa, Homo sapiens
FTHFLPRPVDPDK

SEQ ID NO: 1846 - protein, 13 aa, Homo sapiens
FTHFLPRPVDPDK

SEQ ID NO: 1847 - protein, 13 aa, Homo sapiens
FTHFLPRPVDPDK

SEQ ID NO: 1848 - protein, 13 aa, Homo sapiens
FTHFLPRPVDPDK

SEQ ID NO: 1849 - protein, 8 aa, Homo sapiens
GELYGSEK

SEQ ID NO: 1850 - protein, 8 aa, Homo sapiens
GELYGSEK

SEQ ID NO: 1851 - protein, 8 aa, Homo sapiens
GELYGSEK

SEQ ID NO: 1852 - protein, 8 aa, Homo sapiens
GELYGSEK

SEQ ID NO: 1853 - protein, 11 aa, Homo sapiens
GPAVTDLDHLK

SEQ ID NO: 1854 - protein, 11 aa, Homo sapiens
GPAVTDLDHLK

SEQ ID NO: 1855 - protein, 11 aa, Homo sapiens
GPAVTDLDHLK

SEQ ID NO: 1856 - protein, 11 aa, Homo sapiens
GPAVTDLDHLK

SEQ ID NO: 1857 - protein, 8 aa, Homo sapiens
EIEVLYIR

SEQ ID NO: 1858 - protein, 8 aa, Homo sapiens
EIEVLYIR

SEQ ID NO: 1859 - protein, 8 aa, Homo sapiens
EIEVLYIR

SEQ ID NO: 1860 - protein, 8 aa, Homo sapiens
EIEVLYIR

SEQ ID NO: 1861 - protein, 8 aa, Homo sapiens
QLVEDLDR

SEQ ID NO: 1862 - protein, 8 aa, Homo sapiens
QLVEDLDR

SEQ ID NO: 1863 - protein, 8 aa, Homo sapiens
QLVEDLDR

SEQ ID NO: 1864 - protein, 8 aa, Homo sapiens
QLVEDLDR

SEQ ID NO: 1865 - protein, 11 aa, Homo sapiens
TVLIGEYLQIK

SEQ ID NO: 1866 - protein, 11 aa, Homo sapiens
TVLIGEYLQIK

SEQ ID NO: 1867 - protein, 11 aa, Homo sapiens
TVLIGEYLQIK

SEQ ID NO: 1868 - protein, 11 aa, Homo sapiens
TVLIGEYLQIK

SEQ ID NO: 1869 - protein, 10 aa, Homo sapiens
YGPDGLPYLK

SEQ ID NO: 1870 - protein, 10 aa, Homo sapiens
YGPDGLPYLK

SEQ ID NO: 1871 - protein, 10 aa, Homo sapiens
YGPDGLPYLK

SEQ ID NO: 1872 - protein, 10 aa, Homo sapiens
YGPDGLPYLK

SEQ ID NO: 1873 - protein, 20 aa, Homo sapiens
YQISQPEVYVAAPGESLEVR

SEQ ID NO: 1874 - protein, 20 aa, Homo sapiens
YQISQPEVYVAAPGESLEVR

SEQ ID NO: 1875 - protein, 20 aa, Homo sapiens
YQISQPEVYVAAPGESLEVR

SEQ ID NO: 1876 - protein, 20 aa, Homo sapiens
YQISQPEVYVAAPGESLEVR

SEQ ID NO: 1877 - protein, 10 aa, Homo sapiens
DGTGLVPSER

SEQ ID NO: 1878 - protein, 10 aa, Homo sapiens
DGTGLVPSER

SEQ ID NO: 1879 - protein, 10 aa, Homo sapiens
DGTGLVPSER

SEQ ID NO: 1880 - protein, 10 aa, Homo sapiens
DGTGLVPSER

SEQ ID NO: 1881 - protein, 22 aa, Homo sapiens
LSSGEGPTLANVSELELPADPK

SEQ ID NO: 1882 - protein, 22 aa, Homo sapiens
LSSGEGPTLANVSELELPADPK

SEQ ID NO: 1883 - protein, 22 aa, Homo sapiens
LSSGEGPTLANVSELELPADPK

SEQ ID NO: 1884 - protein, 22 aa, Homo sapiens
LSSGEGPTLANVSELELPADPK

SEQ ID NO: 1885 - protein, 8 aa, Homo sapiens
QLVEDLDR

SEQ ID NO: 1886 - protein, 8 aa, Homo sapiens
QLVEDLDR

SEQ ID NO: 1887 - protein, 8 aa, Homo sapiens
QLVEDLDR

SEQ ID NO: 1888 - protein, 8 aa, Homo sapiens
QLVEDLDR

SEQ ID NO: 1889 - protein, 9 aa, Homo sapiens
TAGANTTDK

SEQ ID NO: 1890 - protein, 9 aa, Homo sapiens
TAGANTTDK

SEQ ID NO: 1891 - protein, 9 aa, Homo sapiens
TAGANTTDK

SEQ ID NO: 1892 - protein, 9 aa, Homo sapiens
TAGANTTDK

SEQ ID NO: 1893 - protein, 13 aa, Homo sapiens
VGPDGTPYVTVLK

SEQ ID NO: 1894 - protein, 13 aa, Homo sapiens
VGPDGTPYVTVLK

SEQ ID NO: 1895 - protein, 13 aa, Homo sapiens
VGPDGTPYVTVLK

SEQ ID NO: 1896 - protein, 13 aa, Homo sapiens
VGPDGTPYVTVLK

SEQ ID NO: 1897 - protein, 8 aa, Homo sapiens
ELESEVNK

SEQ ID NO: 1898 - protein, 8 aa, Homo sapiens
ELESEVNK

SEQ ID NO: 1899 - protein, 8 aa, Homo sapiens
ELESEVNK

SEQ ID NO: 1900 - protein, 8 aa, Homo sapiens
ELESEVNK

SEQ ID NO: 1901 - protein, 15 aa, Homo sapiens
LHVGNYNGTAGDALR

SEQ ID NO: 1902 - protein, 15 aa, Homo sapiens
LHVGNYNGTAGDALR

SEQ ID NO: 1903 - protein, 15 aa, Homo sapiens
LHVGNYNGTAGDALR

SEQ ID NO: 1904 - protein, 15 aa, Homo sapiens
LHVGNYNGTAGDALR

SEQ ID NO: 1905 - protein, 11 aa, Homo sapiens
LQADDNGDPGR

SEQ ID NO: 1906 - protein, 11 aa, Homo sapiens
LQADDNGDPGR

SEQ ID NO: 1907 - protein, 11 aa, Homo sapiens
LQADDNGDPGR

SEQ ID NO: 1908 - protein, 11 aa, Homo sapiens
LQADDNGDPGR

SEQ ID NO: 1909 - protein, 18 aa, Homo sapiens
NGLLLPSTGAPGEVGDNR

SEQ ID NO: 1910 - protein, 18 aa, Homo sapiens
NGLLLPSTGAPGEVGDNR

SEQ ID NO: 1911 - protein, 18 aa, Homo sapiens
NGLLLPSTGAPGEVGDNR

SEQ ID NO: 1912 - protein, 18 aa, Homo sapiens
NGLLLPSTGAPGEVGDNR

SEQ ID NO: 1913 - protein, 14 aa, Homo sapiens
VANLTFVVNSLDGK

SEQ ID NO: 1914 - protein, 14 aa, Homo sapiens
VANLTFVVNSLDGK

SEQ ID NO: 1915 - protein, 14 aa, Homo sapiens
VANLTFVVNSLDGK

SEQ ID NO: 1916 - protein, 14 aa, Homo sapiens
VANLTFVVNSLDGK

SEQ ID NO: 1917 - protein, 8 aa, Homo sapiens
EDFPASWR

SEQ ID NO: 1918 - protein, 14 aa, Homo sapiens
FGQHLIKPSVVFLK

SEQ ID NO: 1919 - protein, 14 aa, Homo sapiens
FGQHLIKPSVVFLK

SEQ ID NO: 1920 - protein, 14 aa, Homo sapiens
FGQHLIKPSVVFLK

SEQ ID NO: 1921 - protein, 14 aa, Homo sapiens
FGQHLIKPSVVFLK

SEQ ID NO: 1922 - protein, 18 aa, Homo sapiens
FHDLRPDEVADLFQTTQR

SEQ ID NO: 1923 - protein, 18 aa, Homo sapiens
FHDLRPDEVADLFQTTQR

SEQ ID NO: 1924 - protein, 18 aa, Homo sapiens
FHDLRPDEVADLFQTTQR

SEQ ID NO: 1925 - protein, 18 aa, Homo sapiens
FHDLRPDEVADLFQTTQR

SEQ ID NO: 1926 - protein, 10 aa, Homo sapiens
NDSIYEELQK

SEQ ID NO: 1927 - protein, 10 aa, Homo sapiens
NDSIYEELQK

SEQ ID NO: 1928 - protein, 10 aa, Homo sapiens
NDSIYEELQK

SEQ ID NO: 1929 - protein, 10 aa, Homo sapiens
NDSIYEELQK

SEQ ID NO: 1930 - protein, 7 aa, Homo sapiens
VGTVVEK

SEQ ID NO: 1931 - protein, 7 aa, Homo sapiens
VGTVVEK

SEQ ID NO: 1932 - protein, 7 aa, Homo sapiens
VGTVVEK

SEQ ID NO: 1933 - protein, 7 aa, Homo sapiens
VGTVVEK

SEQ ID NO: 1934 - protein, 16 aa, Homo sapiens
GGSTSYGTGSETESPR

SEQ ID NO: 1935 - protein, 16 aa, Homo sapiens
GGSTSYGTGSETESPR

SEQ ID NO: 1936 - protein, 16 aa, Homo sapiens
GGSTSYGTGSETESPR

SEQ ID NO: 1937 - protein, 16 aa, Homo sapiens
GGSTSYGTGSETESPR

SEQ ID NO: 1938 - protein, 13 aa, Homo sapiens
GLIDEVNQDFTNR

SEQ ID NO: 1939 - protein, 8 aa, Homo sapiens
NSLFEYQK

SEQ ID NO: 1940 - protein, 8 aa, Homo sapiens
NSLFEYQK

SEQ ID NO: 1941 - protein, 8 aa, Homo sapiens
NSLFEYQK

SEQ ID NO: 1942 - protein, 8 aa, Homo sapiens
NSLFEYQK

SEQ ID NO: 1943 - protein, 9 aa, Homo sapiens
TVIGPDGHK

SEQ ID NO: 1944 - protein, 9 aa, Homo sapiens
TVIGPDGHK

SEQ ID NO: 1945 - protein, 9 aa, Homo sapiens
TVIGPDGHK

SEQ ID NO: 1946 - protein, 9 aa, Homo sapiens
TVIGPDGHK

SEQ ID NO: 1947 - protein, 9 aa, Homo sapiens
VQHIQLLQK

SEQ ID NO: 1948 - protein, 9 aa, Homo sapiens
VQHIQLLQK

SEQ ID NO: 1949 - protein, 9 aa, Homo sapiens
VQHIQLLQK

SEQ ID NO: 1950 - protein, 9 aa, Homo sapiens
VQHIQLLQK

SEQ ID NO: 1951 - protein, 18 aa, Homo sapiens
HTSVQTTSSGSGPFTDVR

SEQ ID NO: 1952 - protein, 18 aa, Homo sapiens
HTSVQTTSSGSGPFTDVR

SEQ ID NO: 1953 - protein, 18 aa, Homo sapiens
HTSVQTTSSGSGPFTDVR

SEQ ID NO: 1954 - protein, 18 aa, Homo sapiens
HTSVQTTSSGSGPFTDVR

SEQ ID NO: 1955 - protein, 19 aa, Homo sapiens
SSPVVIDASTAIDAPSNLR

SEQ ID NO: 1956 - protein, 14 aa, Homo sapiens
SYTITGLQPGTDYK

SEQ ID NO: 1957 - protein, 14 aa, Homo sapiens
SYTITGLQPGTDYK

SEQ ID NO: 1958 - protein, 14 aa, Homo sapiens
SYTITGLQPGTDYK

SEQ ID NO: 1959 - protein, 14 aa, Homo sapiens
SYTITGLQPGTDYK

SEQ ID NO: 1960 - protein, 15 aa, Homo sapiens
VPGTSTSATLTGLTR

SEQ ID NO: 1961 - protein, 15 aa, Homo sapiens
VPGTSTSATLTGLTR

SEQ ID NO: 1962 - protein, 15 aa, Homo sapiens
VPGTSTSATLTGLTR

SEQ ID NO: 1963 - protein, 15 aa, Homo sapiens
VPGTSTSATLTGLTR

SEQ ID NO: 1964 - protein, 28 aa, Homo sapiens
VVTPLSPPTNLHLEANPDTGVLTVSWER

SEQ ID NO: 1965 - protein, 28 aa, Homo sapiens
VVTPLSPPTNLHLEANPDTGVLTVSWER

SEQ ID NO: 1966 - protein, 28 aa, Homo sapiens
VVTPLSPPTNLHLEANPDTGVLTVSWER

SEQ ID NO: 1967 - protein, 28 aa, Homo sapiens
VVTPLSPPTNLHLEANPDTGVLTVSWER

SEQ ID NO: 1968 - protein, 12 aa, Homo sapiens
AEAGLETESPVR

SEQ ID NO: 1969 - protein, 12 aa, Homo sapiens
AEAGLETESPVR

SEQ ID NO: 1970 - protein, 12 aa, Homo sapiens
AEAGLETESPVR

SEQ ID NO: 1971 - protein, 12 aa, Homo sapiens
AEAGLETESPVR

SEQ ID NO: 1972 - protein, 6 aa, Homo sapiens
ANYWLK

SEQ ID NO: 1973 - protein, 6 aa, Homo sapiens
ANYWLK

SEQ ID NO: 1974 - protein, 6 aa, Homo sapiens
ANYWLK

SEQ ID NO: 1975 - protein, 6 aa, Homo sapiens
ANYWLK

SEQ ID NO: 1976 - protein, 10 aa, Homo sapiens
DPLVIELGQK

SEQ ID NO: 1977 - protein, 10 aa, Homo sapiens
DPLVIELGQK

SEQ ID NO: 1978 - protein, 10 aa, Homo sapiens
DPLVIELGQK

SEQ ID NO: 1979 - protein, 10 aa, Homo sapiens
DPLVIELGQK

SEQ ID NO: 1980 - protein, 8 aa, Homo sapiens
IIDTSLTR

SEQ ID NO: 1981 - protein, 8 aa, Homo sapiens
IIDTSLTR

SEQ ID NO: 1982 - protein, 8 aa, Homo sapiens
IIDTSLTR

SEQ ID NO: 1983 - protein, 8 aa, Homo sapiens
IIDTSLTR

SEQ ID NO: 1984 - protein, 22 aa, Homo sapiens
DSWVFGGIDPQSGAAVVHEIVR

SEQ ID NO: 1985 - protein, 22 aa, Homo sapiens
DSWVFGGIDPQSGAAVVHEIVR

SEQ ID NO: 1986 - protein, 22 aa, Homo sapiens
DSWVFGGIDPQSGAAVVHEIVR

SEQ ID NO: 1987 - protein, 22 aa, Homo sapiens
DSWVFGGIDPQSGAAVVHEIVR

SEQ ID NO: 1988 - protein, 17 aa, Homo sapiens
GVILYSDPADYFAPGVK

SEQ ID NO: 1989 - protein, 17 aa, Homo sapiens
GVILYSDPADYFAPGVK

SEQ ID NO: 1990 - protein, 17 aa, Homo sapiens
GVILYSDPADYFAPGVK

SEQ ID NO: 1991 - protein, 17 aa, Homo sapiens
GVILYSDPADYFAPGVK

SEQ ID NO: 1992 - protein, 13 aa, Homo sapiens
LGSGNDFEVFFQR

SEQ ID NO: 1993 - protein, 13 aa, Homo sapiens
LGSGNDFEVFFQR

SEQ ID NO: 1994 - protein, 13 aa, Homo sapiens
LGSGNDFEVFFQR

SEQ ID NO: 1995 - protein, 13 aa, Homo sapiens
LGSGNDFEVFFQR

SEQ ID NO: 1996 - protein, 15 aa, Homo sapiens
SYPDGWNLPGGGVQR

SEQ ID NO: 1997 - protein, 15 aa, Homo sapiens
SYPDGWNLPGGGVQR

SEQ ID NO: 1998 - protein, 15 aa, Homo sapiens
SYPDGWNLPGGGVQR

SEQ ID NO: 1999 - protein, 15 aa, Homo sapiens
SYPDGWNLPGGGVQR

SEQ ID NO: 2000 - protein, 14 aa, Homo sapiens
TYSVSFDSLFSAVK

SEQ ID NO: 2001 - protein, 14 aa, Homo sapiens
TYSVSFDSLFSAVK

SEQ ID NO: 2002 - protein, 14 aa, Homo sapiens
TYSVSFDSLFSAVK

SEQ ID NO: 2003 - protein, 14 aa, Homo sapiens
TYSVSFDSLFSAVK

SEQ ID NO: 2004 - protein, 7 aa, Homo sapiens
DVSYLYR

SEQ ID NO: 2005 - protein, 7 aa, Homo sapiens
DVSYLYR

SEQ ID NO: 2006 - protein, 7 aa, Homo sapiens
DVSYLYR

SEQ ID NO: 2007 - protein, 7 aa, Homo sapiens
DVSYLYR

SEQ ID NO: 2008 - protein, 8 aa, Homo sapiens
EKPGPEDK

SEQ ID NO: 2009 - protein, 8 aa, Homo sapiens
EKPGPEDK

SEQ ID NO: 2010 - protein, 8 aa, Homo sapiens
EKPGPEDK

SEQ ID NO: 2011 - protein, 8 aa, Homo sapiens
EKPGPEDK

SEQ ID NO: 2012 - protein, 10 aa, Homo sapiens
GWNWTSGFNK

SEQ ID NO: 2013 - protein, 10 aa, Homo sapiens
GWNWTSGFNK

SEQ ID NO: 2014 - protein, 10 aa, Homo sapiens
GWNWTSGFNK

SEQ ID NO: 2015 - protein, 10 aa, Homo sapiens
GWNWTSGFNK

SEQ ID NO: 2016 - protein, 6 aa, Homo sapiens
VSNYSR

SEQ ID NO: 2017 - protein, 6 aa, Homo sapiens
VSNYSR

SEQ ID NO: 2018 - protein, 6 aa, Homo sapiens
VSNYSR

SEQ ID NO: 2019 - protein, 6 aa, Homo sapiens
VSNYSR

SEQ ID NO: 2020 - protein, 27 aa, Homo sapiens
AYEQVMHYPGYGSPMPGSLAMGPVTNK

SEQ ID NO: 2021 - protein, 27 aa, Homo sapiens
AYEQVMHYPGYGSPMPGSLAMGPVTNK

SEQ ID NO: 2022 - protein, 27 aa, Homo sapiens
AYEQVMHYPGYGSPMPGSLAMGPVTNK

SEQ ID NO: 2023 - protein, 27 aa, Homo sapiens
AYEQVMHYPGYGSPMPGSLAMGPVTNK

SEQ ID NO: 2024 - protein, 10 aa, Homo sapiens
EAAGAAGSGK

SEQ ID NO: 2025 - protein, 10 aa, Homo sapiens
EAAGAAGSGK

SEQ ID NO: 2026 - protein, 10 aa, Homo sapiens
EAAGAAGSGK

SEQ ID NO: 2027 - protein, 10 aa, Homo sapiens
EAAGAAGSGK

SEQ ID NO: 2028 - protein, 12 aa, Homo sapiens
MHSASSMLGAVK

SEQ ID NO: 2029 - protein, 12 aa, Homo sapiens
MHSASSMLGAVK

SEQ ID NO: 2030 - protein, 12 aa, Homo sapiens
MHSASSMLGAVK

SEQ ID NO: 2031 - protein, 12 aa, Homo sapiens
MHSASSMLGAVK

SEQ ID NO: 2032 - protein, 19 aa, Homo sapiens
MLTLSEIYQWIMDLFPFYR

SEQ ID NO: 2033 - protein, 25 aa, Homo sapiens
SYTHAKPPYSYISLITMAIQQSPNK

SEQ ID NO: 2034 - protein, 27 aa, Homo sapiens
TGLDASPLAADTSYYQGVYSRPIMNSS

SEQ ID NO: 2035 - protein, 27 aa, Homo sapiens
TGLDASPLAADTSYYQGVYSRPIMNSS

SEQ ID NO: 2036 - protein, 27 aa, Homo sapiens
TGLDASPLAADTSYYQGVYSRPIMNSS

SEQ ID NO: 2037 - protein, 27 aa, Homo sapiens
TGLDASPLAADTSYYQGVYSRPIMNSS

SEQ ID NO: 2038 - protein, 6 aa, Homo sapiens
WQNSIR

SEQ ID NO: 2039 - protein, 12 aa, Homo sapiens
AEYLPPSVASIK

SEQ ID NO: 2040 - protein, 12 aa, Homo sapiens
AEYLPPSVASIK

SEQ ID NO: 2041 - protein, 12 aa, Homo sapiens
AEYLPPSVASIK

SEQ ID NO: 2042 - protein, 12 aa, Homo sapiens
AEYLPPSVASIK

SEQ ID NO: 2043 - protein, 9 aa, Homo sapiens
APSPLGPTR

SEQ ID NO: 2044 - protein, 9 aa, Homo sapiens
APSPLGPTR

SEQ ID NO: 2045 - protein, 9 aa, Homo sapiens
APSPLGPTR

SEQ ID NO: 2046 - protein, 9 aa, Homo sapiens
APSPLGPTR

SEQ ID NO: 2047 - protein, 12 aa, Homo sapiens
ELLSGIGNISER

SEQ ID NO: 2048 - protein, 12 aa, Homo sapiens
ELLSGIGNISER

SEQ ID NO: 2049 - protein, 12 aa, Homo sapiens
ELLSGIGNISER

SEQ ID NO: 2050 - protein, 12 aa, Homo sapiens
ELLSGIGNISER

SEQ ID NO: 2051 - protein, 13 aa, Homo sapiens
EPGSQPAGPASLR

SEQ ID NO: 2052 - protein, 13 aa, Homo sapiens
EPGSQPAGPASLR

SEQ ID NO: 2053 - protein, 13 aa, Homo sapiens
EPGSQPAGPASLR

SEQ ID NO: 2054 - protein, 13 aa, Homo sapiens
EPGSQPAGPASLR

SEQ ID NO: 2055 - protein, 11 aa, Homo sapiens
SAPGDPNALVK

SEQ ID NO: 2056 - protein, 11 aa, Homo sapiens
SAPGDPNALVK

SEQ ID NO: 2057 - protein, 11 aa, Homo sapiens
SAPGDPNALVK

SEQ ID NO: 2058 - protein, 11 aa, Homo sapiens
SAPGDPNALVK

SEQ ID NO: 2059 - protein, 10 aa, Homo sapiens
HTLGDSDNES

SEQ ID NO: 2060 - protein, 11 aa, Homo sapiens
NVNQSLLELHK

SEQ ID NO: 2061 - protein, 11 aa, Homo sapiens
NVNQSLLELHK

SEQ ID NO: 2062 - protein, 11 aa, Homo sapiens
NVNQSLLELHK

SEQ ID NO: 2063 - protein, 11 aa, Homo sapiens
NVNQSLLELHK

SEQ ID NO: 2064 - protein, 13 aa, Homo sapiens
QNYHQDSEAAINR

SEQ ID NO: 2065 - protein, 10 aa, Homo sapiens
YFLHQSHEER

SEQ ID NO: 2066 - protein, 10 aa, Homo sapiens
YFLHQSHEER

SEQ ID NO: 2067 - protein, 10 aa, Homo sapiens
YFLHQSHEER

SEQ ID NO: 2068 - protein, 10 aa, Homo sapiens
YFLHQSHEER

SEQ ID NO: 2069 - protein, 7 aa, Homo sapiens
ALFQDIK

SEQ ID NO: 2070 - protein, 7 aa, Homo sapiens
ALFQDIK

SEQ ID NO: 2071 - protein, 7 aa, Homo sapiens
ALFQDIK

SEQ ID NO: 2072 - protein, 7 aa, Homo sapiens
ALFQDIK

SEQ ID NO: 2073 - protein, 13 aa, Homo sapiens
DDVALEGVSHFFR

SEQ ID NO: 2074 - protein, 13 aa, Homo sapiens
DDVALEGVSHFFR

SEQ ID NO: 2075 - protein, 13 aa, Homo sapiens
DDVALEGVSHFFR

SEQ ID NO: 2076 - protein, 13 aa, Homo sapiens
DDVALEGVSHFFR

SEQ ID NO: 2077 - protein, 9 aa, Homo sapiens
KPAEDEWGK

SEQ ID NO: 2078 - protein, 9 aa, Homo sapiens
KPAEDEWGK

SEQ ID NO: 2079 - protein, 9 aa, Homo sapiens
KPAEDEWGK

SEQ ID NO: 2080 - protein, 9 aa, Homo sapiens
KPAEDEWGK

SEQ ID NO: 2081 - protein, 15 aa, Homo sapiens
LGGPEAGLGEYLFER

SEQ ID NO: 2082 - protein, 15 aa, Homo sapiens
LGGPEAGLGEYLFER

SEQ ID NO: 2083 - protein, 15 aa, Homo sapiens
LGGPEAGLGEYLFER

SEQ ID NO: 2084 - protein, 15 aa, Homo sapiens
LGGPEAGLGEYLFER

SEQ ID NO: 2085 - protein, 15 aa, Homo sapiens
LNQALLDLHALGSAR

SEQ ID NO: 2086 - protein, 15 aa, Homo sapiens
LNQALLDLHALGSAR

SEQ ID NO: 2087 - protein, 15 aa, Homo sapiens
LNQALLDLHALGSAR

SEQ ID NO: 2088 - protein, 15 aa, Homo sapiens
LNQALLDLHALGSAR

SEQ ID NO: 2089 - protein, 10 aa, Homo sapiens
MGDHLTNLHR

SEQ ID NO: 2090 - protein, 10 aa, Homo sapiens
MGDHLTNLHR

SEQ ID NO: 2091 - protein, 10 aa, Homo sapiens
MGDHLTNLHR

SEQ ID NO: 2092 - protein, 10 aa, Homo sapiens
MGDHLTNLHR

SEQ ID NO: 2093 - protein, 15 aa, Homo sapiens
GALQNIIPASTGAAK

SEQ ID NO: 2094 - protein, 15 aa, Homo sapiens
GALQNIIPASTGAAK

SEQ ID NO: 2095 - protein, 15 aa, Homo sapiens
GALQNIIPASTGAAK

SEQ ID NO: 2096 - protein, 15 aa, Homo sapiens
GALQNIIPASTGAAK

SEQ ID NO: 2097 - protein, 14 aa, Homo sapiens
LISWYDNEFGYSNR

SEQ ID NO: 2098 - protein, 14 aa, Homo sapiens
LISWYDNEFGYSNR

SEQ ID NO: 2099 - protein, 14 aa, Homo sapiens
LISWYDNEFGYSNR

SEQ ID NO: 2100 - protein, 14 aa, Homo sapiens
LVINGNPITIFQER

SEQ ID NO: 2101 - protein, 14 aa, Homo sapiens
LVINGNPITIFQER

SEQ ID NO: 2102 - protein, 14 aa, Homo sapiens
LVINGNPITIFQER

SEQ ID NO: 2103 - protein, 14 aa, Homo sapiens
LVINGNPITIFQER

SEQ ID NO: 2104 - protein, 11 aa, Homo sapiens
VVDLMAHMASK

SEQ ID NO: 2105 - protein, 11 aa, Homo sapiens
VVDLMAHMASK

SEQ ID NO: 2106 - protein, 11 aa, Homo sapiens
VVDLMAHMASK

SEQ ID NO: 2107 - protein, 11 aa, Homo sapiens
VVDLMAHMASK

SEQ ID NO: 2108 - protein, 11 aa, Homo sapiens
VVDLMAHMASK

SEQ ID NO: 2109 - protein, 11 aa, Homo sapiens
VVDLMAHMASK

SEQ ID NO: 2110 - protein, 11 aa, Homo sapiens
VVDLMAHMASK

SEQ ID NO: 2111 - protein, 11 aa, Homo sapiens
VVDLMAHMASK

SEQ ID NO: 2112 - protein, 15 aa, Homo sapiens
DGLLPENTFIVGYAR

SEQ ID NO: 2113 - protein, 15 aa, Homo sapiens
DGLLPENTFIVGYAR

SEQ ID NO: 2114 - protein, 15 aa, Homo sapiens
DGLLPENTFIVGYAR

SEQ ID NO: 2115 - protein, 15 aa, Homo sapiens
DGLLPENTFIVGYAR

SEQ ID NO: 2116 - protein, 11 aa, Homo sapiens
GGYFDEFGIIR

SEQ ID NO: 2117 - protein, 11 aa, Homo sapiens
GGYFDEFGIIR

SEQ ID NO: 2118 - protein, 11 aa, Homo sapiens
GGYFDEFGIIR

SEQ ID NO: 2119 - protein, 11 aa, Homo sapiens
GGYFDEFGIIR

SEQ ID NO: 2120 - protein, 24 aa, Homo sapiens
IFTPLLHQIELEKPKPIPYIYGSR

SEQ ID NO: 2121 - protein, 7 aa, Homo sapiens
LPDAYER

SEQ ID NO: 2122 - protein, 7 aa, Homo sapiens
LPDAYER

SEQ ID NO: 2123 - protein, 7 aa, Homo sapiens
LPDAYER

SEQ ID NO: 2124 - protein, 7 aa, Homo sapiens
LPDAYER

SEQ ID NO: 2125 - protein, 16 aa, Homo sapiens
NSYVAGQYDDAASYQR

SEQ ID NO: 2126 - protein, 16 aa, Homo sapiens
NSYVAGQYDDAASYQR

SEQ ID NO: 2127 - protein, 16 aa, Homo sapiens
NSYVAGQYDDAASYQR

SEQ ID NO: 2128 - protein, 16 aa, Homo sapiens
NSYVAGQYDDAASYQR

SEQ ID NO: 2129 - protein, 8 aa, Homo sapiens
AVLHVALR

SEQ ID NO: 2130 - protein, 8 aa, Homo sapiens
AVLHVALR

SEQ ID NO: 2131 - protein, 8 aa, Homo sapiens
AVLHVALR

SEQ ID NO: 2132 - protein, 8 aa, Homo sapiens
AVLHVALR

SEQ ID NO: 2133 - protein, 21 aa, Homo sapiens
FNHFSLTLNTNHGHILVDYSK

SEQ ID NO: 2134 - protein, 17 aa, Homo sapiens
TLAQLNPESSLFIIASK

SEQ ID NO: 2135 - protein, 17 aa, Homo sapiens
TLAQLNPESSLFIIASK

SEQ ID NO: 2136 - protein, 17 aa, Homo sapiens
TLAQLNPESSLFIIASK

SEQ ID NO: 2137 - protein, 17 aa, Homo sapiens
TLAQLNPESSLFIIASK

SEQ ID NO: 2138 - protein, 30 aa, Homo sapiens
VDHQTGPIVWGEPGTNGQHAFYQLIHQGTK

SEQ ID NO: 2139 - protein, 15 aa, Homo sapiens
VFEGNRPTNSIVFTK

SEQ ID NO: 2140 - protein, 27 aa, Homo sapiens
AAPPAPNAPAAGEDTTETAPAPGTPAR

SEQ ID NO: 2141 - protein, 27 aa, Homo sapiens
AAPPAPNAPAAGEDTTETAPAPGTPAR

SEQ ID NO: 2142 - protein, 27 aa, Homo sapiens
AAPPAPNAPAAGEDTTETAPAPGTPAR

SEQ ID NO: 2143 - protein, 27 aa, Homo sapiens
AAPPAPNAPAAGEDTTETAPAPGTPAR

SEQ ID NO: 2144 - protein, 19 aa, Homo sapiens
ALEAVASVTPTGPVPDPAR

SEQ ID NO: 2145 - protein, 19 aa, Homo sapiens
ALEAVASVTPTGPVPDPAR

SEQ ID NO: 2146 - protein, 19 aa, Homo sapiens
ALEAVASVTPTGPVPDPAR

SEQ ID NO: 2147 - protein, 19 aa, Homo sapiens
ALEAVASVTPTGPVPDPAR

SEQ ID NO: 2148 - protein, 10 aa, Homo sapiens
LVQFEQEIER

SEQ ID NO: 2149 - protein, 10 aa, Homo sapiens
LVQFEQEIER

SEQ ID NO: 2150 - protein, 10 aa, Homo sapiens
LVQFEQEIER

SEQ ID NO: 2151 - protein, 10 aa, Homo sapiens
LVQFEQEIER

SEQ ID NO: 2152 - protein, 11 aa, Homo sapiens
VGDSSLLIFVR

SEQ ID NO: 2153 - protein, 11 aa, Homo sapiens
VGDSSLLIFVR

SEQ ID NO: 2154 - protein, 11 aa, Homo sapiens
VGDSSLLIFVR

SEQ ID NO: 2155 - protein, 11 aa, Homo sapiens
VGDSSLLIFVR

SEQ ID NO: 2156 - protein, 17 aa, Homo sapiens
VSSPSPELGTTPASIFR

SEQ ID NO: 2157 - protein, 17 aa, Homo sapiens
VSSPSPELGTTPASIFR

SEQ ID NO: 2158 - protein, 17 aa, Homo sapiens
VSSPSPELGTTPASIFR

SEQ ID NO: 2159 - protein, 17 aa, Homo sapiens
VSSPSPELGTTPASIFR

SEQ ID NO: 2160 - protein, 20 aa, Homo sapiens
EIILVDDYSNDPEDGALLGK

SEQ ID NO: 2161 - protein, 20 aa, Homo sapiens
EIILVDDYSNDPEDGALLGK

SEQ ID NO: 2162 - protein, 20 aa, Homo sapiens
EIILVDDYSNDPEDGALLGK

SEQ ID NO: 2163 - protein, 20 aa, Homo sapiens
EIILVDDYSNDPEDGALLGK

SEQ ID NO: 2164 - protein, 10 aa, Homo sapiens
GGFDWNLVFK

SEQ ID NO: 2165 - protein, 10 aa, Homo sapiens
GGFDWNLVFK

SEQ ID NO: 2166 - protein, 10 aa, Homo sapiens
GGFDWNLVFK

SEQ ID NO: 2167 - protein, 10 aa, Homo sapiens
GGFDWNLVFK

SEQ ID NO: 2168 - protein, 11 aa, Homo sapiens
NFYYAAVPSAR

SEQ ID NO: 2169 - protein, 11 aa, Homo sapiens
NFYYAAVPSAR

SEQ ID NO: 2170 - protein, 11 aa, Homo sapiens
NFYYAAVPSAR

SEQ ID NO: 2171 - protein, 11 aa, Homo sapiens
NFYYAAVPSAR

SEQ ID NO: 2172 - protein, 17 aa, Homo sapiens
VDLPATSVVITFHNEAR

SEQ ID NO: 2173 - protein, 17 aa, Homo sapiens
VDLPATSVVITFHNEAR

SEQ ID NO: 2174 - protein, 17 aa, Homo sapiens
VDLPATSVVITFHNEAR

SEQ ID NO: 2175 - protein, 17 aa, Homo sapiens
VDLPATSVVITFHNEAR

SEQ ID NO: 2176 - protein, 11 aa, Homo sapiens
WYLENVYPELR

SEQ ID NO: 2177 - protein, 11 aa, Homo sapiens
WYLENVYPELR

SEQ ID NO: 2178 - protein, 11 aa, Homo sapiens
WYLENVYPELR

SEQ ID NO: 2179 - protein, 11 aa, Homo sapiens
WYLENVYPELR

SEQ ID NO: 2180 - protein, 12 aa, Homo sapiens
DGEATLEVDGTR

SEQ ID NO: 2181 - protein, 12 aa, Homo sapiens
DGEATLEVDGTR

SEQ ID NO: 2182 - protein, 12 aa, Homo sapiens
DGEATLEVDGTR

SEQ ID NO: 2183 - protein, 12 aa, Homo sapiens
DGEATLEVDGTR

SEQ ID NO: 2184 - protein, 15 aa, Homo sapiens
EVFENDPETDYFYPR

SEQ ID NO: 2185 - protein, 15 aa, Homo sapiens
EVFENDPETDYFYPR

SEQ ID NO: 2186 - protein, 15 aa, Homo sapiens
EVFENDPETDYFYPR

SEQ ID NO: 2187 - protein, 15 aa, Homo sapiens
EVFENDPETDYFYPR

SEQ ID NO: 2188 - protein, 13 aa, Homo sapiens
GQSEVSAAQLQER

SEQ ID NO: 2189 - protein, 13 aa, Homo sapiens
GQSEVSAAQLQER

SEQ ID NO: 2190 - protein, 13 aa, Homo sapiens
GQSEVSAAQLQER

SEQ ID NO: 2191 - protein, 13 aa, Homo sapiens
GQSEVSAAQLQER

SEQ ID NO: 2192 - protein, 12 aa, Homo sapiens
IAVAGDLFQPER

SEQ ID NO: 2193 - protein, 12 aa, Homo sapiens
IAVAGDLFQPER

SEQ ID NO: 2194 - protein, 12 aa, Homo sapiens
IAVAGDLFQPER

SEQ ID NO: 2195 - protein, 12 aa, Homo sapiens
IAVAGDLFQPER

SEQ ID NO: 2196 - protein, 17 aa, Homo sapiens
SWNWLNGEDTTIQETVK

SEQ ID NO: 2197 - protein, 17 aa, Homo sapiens
SWNWLNGEDTTIQETVK

SEQ ID NO: 2198 - protein, 17 aa, Homo sapiens
SWNWLNGEDTTIQETVK

SEQ ID NO: 2199 - protein, 17 aa, Homo sapiens
SWNWLNGEDTTIQETVK

SEQ ID NO: 2200 - protein, 17 aa, Homo sapiens
APEPHVEEDDDDELDSK

SEQ ID NO: 2201 - protein, 17 aa, Homo sapiens
APEPHVEEDDDDELDSK

SEQ ID NO: 2202 - protein, 17 aa, Homo sapiens
APEPHVEEDDDDELDSK

SEQ ID NO: 2203 - protein, 17 aa, Homo sapiens
APEPHVEEDDDDELDSK

SEQ ID NO: 2204 - protein, 17 aa, Homo sapiens
APEPHVEEDDDDELDSK

SEQ ID NO: 2205 - protein, 17 aa, Homo sapiens
APEPHVEEDDDDELDSK

SEQ ID NO: 2206 - protein, 17 aa, Homo sapiens
APEPHVEEDDDDELDSK

SEQ ID NO: 2207 - protein, 17 aa, Homo sapiens
APEPHVEEDDDDELDSK

SEQ ID NO: 2208 - protein, 7 aa, Homo sapiens
DIVSGLK

SEQ ID NO: 2209 - protein, 7 aa, Homo sapiens
DIVSGLK

SEQ ID NO: 2210 - protein, 7 aa, Homo sapiens
DIVSGLK

SEQ ID NO: 2211 - protein, 7 aa, Homo sapiens
DIVSGLK

SEQ ID NO: 2212 - protein, 9 aa, Homo sapiens
LNYKPPPQK

SEQ ID NO: 2213 - protein, 9 aa, Homo sapiens
LNYKPPPQK

SEQ ID NO: 2214 - protein, 9 aa, Homo sapiens
LNYKPPPQK

SEQ ID NO: 2215 - protein, 9 aa, Homo sapiens
LNYKPPPQK

SEQ ID NO: 2216 - protein, 9 aa, Homo sapiens
LNYKPPPQK

SEQ ID NO: 2217 - protein, 9 aa, Homo sapiens
LNYKPPPQK

SEQ ID NO: 2218 - protein, 9 aa, Homo sapiens
LNYKPPPQK

SEQ ID NO: 2219 - protein, 9 aa, Homo sapiens
LNYKPPPQK

SEQ ID NO: 2220 - protein, 13 aa, Homo sapiens
QDHLSWEWNLSIK

SEQ ID NO: 2221 - protein, 13 aa, Homo sapiens
QDHLSWEWNLSIK

SEQ ID NO: 2222 - protein, 13 aa, Homo sapiens
QDHLSWEWNLSIK

SEQ ID NO: 2223 - protein, 13 aa, Homo sapiens
QDHLSWEWNLSIK

SEQ ID NO: 2224 - protein, 8 aa, Homo sapiens
SFFTDDDK

SEQ ID NO: 2225 - protein, 8 aa, Homo sapiens
SFFTDDDK

SEQ ID NO: 2226 - protein, 8 aa, Homo sapiens
SFFTDDDK

SEQ ID NO: 2227 - protein, 8 aa, Homo sapiens
SFFTDDDK

SEQ ID NO: 2228 - protein, 13 aa, Homo sapiens
TLLGDGPVVTDPK

SEQ ID NO: 2229 - protein, 13 aa, Homo sapiens
TLLGDGPVVTDPK

SEQ ID NO: 2230 - protein, 13 aa, Homo sapiens
TLLGDGPVVTDPK

SEQ ID NO: 2231 - protein, 13 aa, Homo sapiens
TLLGDGPVVTDPK

SEQ ID NO: 2232 - protein, 22 aa, Homo sapiens
AQPVQVAEGSEPDGFWEALGGK

SEQ ID NO: 2233 - protein, 22 aa, Homo sapiens
AQPVQVAEGSEPDGFWEALGGK

SEQ ID NO: 2234 - protein, 22 aa, Homo sapiens
AQPVQVAEGSEPDGFWEALGGK

SEQ ID NO: 2235 - protein, 22 aa, Homo sapiens
AQPVQVAEGSEPDGFWEALGGK

SEQ ID NO: 2236 - protein, 8 aa, Homo sapiens
EPGLQIWR

SEQ ID NO: 2237 - protein, 8 aa, Homo sapiens
EPGLQIWR

SEQ ID NO: 2238 - protein, 8 aa, Homo sapiens
EPGLQIWR

SEQ ID NO: 2239 - protein, 8 aa, Homo sapiens
EPGLQIWR

SEQ ID NO: 2240 - protein, 24 aa, Homo sapiens
FDLVPVPTNLYGDFFTGDAYVILK

SEQ ID NO: 2241 - protein, 8 aa, Homo sapiens
TASDFITK

SEQ ID NO: 2242 - protein, 8 aa, Homo sapiens
TASDFITK

SEQ ID NO: 2243 - protein, 8 aa, Homo sapiens
TASDFITK

SEQ ID NO: 2244 - protein, 8 aa, Homo sapiens
TASDFITK

SEQ ID NO: 2245 - protein, 18 aa, Homo sapiens
TPSAAYLWVGTGASEAEK

SEQ ID NO: 2246 - protein, 18 aa, Homo sapiens
TPSAAYLWVGTGASEAEK

SEQ ID NO: 2247 - protein, 18 aa, Homo sapiens
TPSAAYLWVGTGASEAEK

SEQ ID NO: 2248 - protein, 18 aa, Homo sapiens
TPSAAYLWVGTGASEAEK

SEQ ID NO: 2249 - protein, 7 aa, Homo sapiens
DYEILFK

SEQ ID NO: 2250 - protein, 7 aa, Homo sapiens
DYEILFK

SEQ ID NO: 2251 - protein, 7 aa, Homo sapiens
DYEILFK

SEQ ID NO: 2252 - protein, 7 aa, Homo sapiens
DYEILFK

SEQ ID NO: 2253 - protein, 13 aa, Homo sapiens
NLDGISHAPNAVK

SEQ ID NO: 2254 - protein, 13 aa, Homo sapiens
NLDGISHAPNAVK

SEQ ID NO: 2255 - protein, 13 aa, Homo sapiens
NLDGISHAPNAVK

SEQ ID NO: 2256 - protein, 13 aa, Homo sapiens
NLDGISHAPNAVK

SEQ ID NO: 2257 - protein, 8 aa, Homo sapiens
YLESAGAR

SEQ ID NO: 2258 - protein, 12 aa, Homo sapiens
YPVYGVQWHPEK

SEQ ID NO: 2259 - protein, 12 aa, Homo sapiens
YPVYGVQWHPEK

SEQ ID NO: 2260 - protein, 12 aa, Homo sapiens
YPVYGVQWHPEK

SEQ ID NO: 2261 - protein, 12 aa, Homo sapiens
YPVYGVQWHPEK

SEQ ID NO: 2262 - protein, 9 aa, Homo sapiens
YYIAASYVK

SEQ ID NO: 2263 - protein, 9 aa, Homo sapiens
YYIAASYVK

SEQ ID NO: 2264 - protein, 9 aa, Homo sapiens
YYIAASYVK

SEQ ID NO: 2265 - protein, 9 aa, Homo sapiens
YYIAASYVK

SEQ ID NO: 2266 - protein, 24 aa, Homo sapiens
FLAELAYDLDVDDAPGNSQQATPK

SEQ ID NO: 2267 - protein, 24 aa, Homo sapiens
FLAELAYDLDVDDAPGNSQQATPK

SEQ ID NO: 2268 - protein, 24 aa, Homo sapiens
FLAELAYDLDVDDAPGNSQQATPK

SEQ ID NO: 2269 - protein, 24 aa, Homo sapiens
FLAELAYDLDVDDAPGNSQQATPK

SEQ ID NO: 2270 - protein, 19 aa, Homo sapiens
FLIIQNAAVFQEAFEIVVR

SEQ ID NO: 2271 - protein, 12 aa, Homo sapiens
GPEPVVSQIIDK

SEQ ID NO: 2272 - protein, 20 aa, Homo sapiens
IFLQALNLGIEVINTTDHLK

SEQ ID NO: 2273 - protein, 9 aa, Homo sapiens
NQFNLHELK

SEQ ID NO: 2274 - protein, 9 aa, Homo sapiens
NQFNLHELK

SEQ ID NO: 2275 - protein, 9 aa, Homo sapiens
NQFNLHELK

SEQ ID NO: 2276 - protein, 9 aa, Homo sapiens
NQFNLHELK

SEQ ID NO: 2277 - protein, 10 aa, Homo sapiens
ELWAALNAWK

SEQ ID NO: 2278 - protein, 10 aa, Homo sapiens
ELWAALNAWK

SEQ ID NO: 2279 - protein, 10 aa, Homo sapiens
ELWAALNAWK

SEQ ID NO: 2280 - protein, 10 aa, Homo sapiens
ELWAALNAWK

SEQ ID NO: 2281 - protein, 11 aa, Homo sapiens
ASQGPPSAISR

SEQ ID NO: 2282 - protein, 10 aa, Homo sapiens
EVNYELVTGK

SEQ ID NO: 2283 - protein, 10 aa, Homo sapiens
EVNYELVTGK

SEQ ID NO: 2284 - protein, 10 aa, Homo sapiens
EVNYELVTGK

SEQ ID NO: 2285 - protein, 10 aa, Homo sapiens
EVNYELVTGK

SEQ ID NO: 2286 - protein, 14 aa, Homo sapiens
ILSESLLTPAEYQK

SEQ ID NO: 2287 - protein, 14 aa, Homo sapiens
ILSESLLTPAEYQK

SEQ ID NO: 2288 - protein, 14 aa, Homo sapiens
ILSESLLTPAEYQK

SEQ ID NO: 2289 - protein, 14 aa, Homo sapiens
ILSESLLTPAEYQK

SEQ ID NO: 2290 - protein, 22 aa, Homo sapiens
TALEQELGLAAYFVSNEVPLEK

SEQ ID NO: 2291 - protein, 22 aa, Homo sapiens
TALEQELGLAAYFVSNEVPLEK

SEQ ID NO: 2292 - protein, 22 aa, Homo sapiens
TALEQELGLAAYFVSNEVPLEK

SEQ ID NO: 2293 - protein, 22 aa, Homo sapiens
TALEQELGLAAYFVSNEVPLEK

SEQ ID NO: 2294 - protein, 13 aa, Homo sapiens
TGAYLQFLSVLSR

SEQ ID NO: 2295 - protein, 13 aa, Homo sapiens
TGAYLQFLSVLSR

SEQ ID NO: 2296 - protein, 13 aa, Homo sapiens
TGAYLQFLSVLSR

SEQ ID NO: 2297 - protein, 13 aa, Homo sapiens
TGAYLQFLSVLSR

SEQ ID NO: 2298 - protein, 18 aa, Homo sapiens
AQHNDSEQTQSPQQPGSR

SEQ ID NO: 2299 - protein, 18 aa, Homo sapiens
ALGNQQPSWDSEDSSNFK

SEQ ID NO: 2300 - protein, 18 aa, Homo sapiens
ALGNQQPSWDSEDSSNFK

SEQ ID NO: 2301 - protein, 18 aa, Homo sapiens
ALGNQQPSWDSEDSSNFK

SEQ ID NO: 2302 - protein, 18 aa, Homo sapiens
ALGNQQPSWDSEDSSNFK

SEQ ID NO: 2303 - protein, 14 aa, Homo sapiens
AVPLPAGGGTVLTK

SEQ ID NO: 2304 - protein, 14 aa, Homo sapiens
AVPLPAGGGTVLTK

SEQ ID NO: 2305 - protein, 14 aa, Homo sapiens
AVPLPAGGGTVLTK

SEQ ID NO: 2306 - protein, 14 aa, Homo sapiens
AVPLPAGGGTVLTK

SEQ ID NO: 2307 - protein, 8 aa, Homo sapiens
LSAPGSQR

SEQ ID NO: 2308 - protein, 8 aa, Homo sapiens
LSAPGSQR

SEQ ID NO: 2309 - protein, 8 aa, Homo sapiens
LSAPGSQR

SEQ ID NO: 2310 - protein, 8 aa, Homo sapiens
LSAPGSQR

SEQ ID NO: 2311 - protein, 9 aa, Homo sapiens
NLLGLIEAK

SEQ ID NO: 2312 - protein, 9 aa, Homo sapiens
NLLGLIEAK

SEQ ID NO: 2313 - protein, 9 aa, Homo sapiens
NLLGLIEAK

SEQ ID NO: 2314 - protein, 9 aa, Homo sapiens
NLLGLIEAK

SEQ ID NO: 2315 - protein, 7 aa, Homo sapiens
NPQLNQQ

SEQ ID NO: 2316 - protein, 18 aa, Homo sapiens
GVPQIEVTFEIDVNGILR

SEQ ID NO: 2317 - protein, 8 aa, Homo sapiens
LTPEEIER

SEQ ID NO: 2318 - protein, 18 aa, Homo sapiens
LYGSAGPPPTGEEDTAEK

SEQ ID NO: 2319 - protein, 18 aa, Homo sapiens
LYGSAGPPPTGEEDTAEK

SEQ ID NO: 2320 - protein, 18 aa, Homo sapiens
LYGSAGPPPTGEEDTAEK

SEQ ID NO: 2321 - protein, 18 aa, Homo sapiens
LYGSAGPPPTGEEDTAEK

SEQ ID NO: 2322 - protein, 12 aa, Homo sapiens
TWNDPSVQQDIK

SEQ ID NO: 2323 - protein, 12 aa, Homo sapiens
TWNDPSVQQDIK

SEQ ID NO: 2324 - protein, 12 aa, Homo sapiens
TWNDPSVQQDIK

SEQ ID NO: 2325 - protein, 12 aa, Homo sapiens
TWNDPSVQQDIK

SEQ ID NO: 2326 - protein, 10 aa, Homo sapiens
VYEGERPLTK

SEQ ID NO: 2327 - protein, 10 aa, Homo sapiens
VYEGERPLTK

SEQ ID NO: 2328 - protein, 10 aa, Homo sapiens
VYEGERPLTK

SEQ ID NO: 2329 - protein, 10 aa, Homo sapiens
VYEGERPLTK

SEQ ID NO: 2330 - protein, 11 aa, Homo sapiens
IIIQESALDYR

SEQ ID NO: 2331 - protein, 11 aa, Homo sapiens
IIIQESALDYR

SEQ ID NO: 2332 - protein, 11 aa, Homo sapiens
IIIQESALDYR

SEQ ID NO: 2333 - protein, 11 aa, Homo sapiens
IIIQESALDYR

SEQ ID NO: 2334 - protein, 8 aa, Homo sapiens
LDPALQDK

SEQ ID NO: 2335 - protein, 8 aa, Homo sapiens
LDPALQDK

SEQ ID NO: 2336 - protein, 8 aa, Homo sapiens
LDPALQDK

SEQ ID NO: 2337 - protein, 8 aa, Homo sapiens
LDPALQDK

SEQ ID NO: 2338 - protein, 7 aa, Homo sapiens
LIAQDYK

SEQ ID NO: 2339 - protein, 7 aa, Homo sapiens
LIAQDYK

SEQ ID NO: 2340 - protein, 7 aa, Homo sapiens
LIAQDYK

SEQ ID NO: 2341 - protein, 7 aa, Homo sapiens
LIAQDYK

SEQ ID NO: 2342 - protein, 7 aa, Homo sapiens
NDINILK

SEQ ID NO: 2343 - protein, 7 aa, Homo sapiens
NDINILK

SEQ ID NO: 2344 - protein, 7 aa, Homo sapiens
NDINILK

SEQ ID NO: 2345 - protein, 7 aa, Homo sapiens
NDINILK

SEQ ID NO: 2346 - protein, 13 aa, Homo sapiens
VAELSSDDFHLDR

SEQ ID NO: 2347 - protein, 13 aa, Homo sapiens
VAELSSDDFHLDR

SEQ ID NO: 2348 - protein, 13 aa, Homo sapiens
VAELSSDDFHLDR

SEQ ID NO: 2349 - protein, 13 aa, Homo sapiens
VAELSSDDFHLDR

SEQ ID NO: 2350 - protein, 18 aa, Homo sapiens
AFLASPEYVNLPINGNGK

SEQ ID NO: 2351 - protein, 18 aa, Homo sapiens
AFLASPEYVNLPINGNGK

SEQ ID NO: 2352 - protein, 18 aa, Homo sapiens
AFLASPEYVNLPINGNGK

SEQ ID NO: 2353 - protein, 18 aa, Homo sapiens
AFLASPEYVNLPINGNGK

SEQ ID NO: 2354 - protein, 20 aa, Homo sapiens
ALPGQLKPFETLLSQNQGGK

SEQ ID NO: 2355 - protein, 20 aa, Homo sapiens
ALPGQLKPFETLLSQNQGGK

SEQ ID NO: 2356 - protein, 20 aa, Homo sapiens
ALPGQLKPFETLLSQNQGGK

SEQ ID NO: 2357 - protein, 20 aa, Homo sapiens
ALPGQLKPFETLLSQNQGGK

SEQ ID NO: 2358 - protein, 15 aa, Homo sapiens
EEVVTVETWQEGSLK

SEQ ID NO: 2359 - protein, 16 aa, Homo sapiens
FQDGDLTLYQSNTILR

SEQ ID NO: 2360 - protein, 13 aa, Homo sapiens
YISLIYTNYEAGK

SEQ ID NO: 2361 - protein, 13 aa, Homo sapiens
YISLIYTNYEAGK

SEQ ID NO: 2362 - protein, 13 aa, Homo sapiens
YISLIYTNYEAGK

SEQ ID NO: 2363 - protein, 13 aa, Homo sapiens
YISLIYTNYEAGK

SEQ ID NO: 2364 - protein, 30 aa, Homo sapiens
AGVQQPVYATIGSGIVNTAFTVVSLFVVER

SEQ ID NO: 2365 - protein, 31 aa, Homo sapiens
QPILIAVVLQLSQQLSGINAVFYYSTSIFEK

SEQ ID NO: 2366 - protein, 10 aa, Homo sapiens
TFDEIASGFR

SEQ ID NO: 2367 - protein, 10 aa, Homo sapiens
TFDEIASGFR

SEQ ID NO: 2368 - protein, 10 aa, Homo sapiens
TFDEIASGFR

SEQ ID NO: 2369 - protein, 10 aa, Homo sapiens
TFDEIASGFR

SEQ ID NO: 2370 - protein, 15 aa, Homo sapiens
TPEELFHPLGADSQV

SEQ ID NO: 2371 - protein, 15 aa, Homo sapiens
TPEELFHPLGADSQV

SEQ ID NO: 2372 - protein, 15 aa, Homo sapiens
TPEELFHPLGADSQV

SEQ ID NO: 2373 - protein, 15 aa, Homo sapiens
TPEELFHPLGADSQV

SEQ ID NO: 2374 - protein, 13 aa, Homo sapiens
VIEEFYNQTWVHR

SEQ ID NO: 2375 - protein, 13 aa, Homo sapiens
VIEEFYNQTWVHR

SEQ ID NO: 2376 - protein, 13 aa, Homo sapiens
VIEEFYNQTWVHR

SEQ ID NO: 2377 - protein, 13 aa, Homo sapiens
VIEEFYNQTWVHR

SEQ ID NO: 2378 - protein, 11 aa, Homo sapiens
AFEGQAHGADR

SEQ ID NO: 2379 - protein, 11 aa, Homo sapiens
AFEGQAHGADR

SEQ ID NO: 2380 - protein, 11 aa, Homo sapiens
AFEGQAHGADR

SEQ ID NO: 2381 - protein, 11 aa, Homo sapiens
AFEGQAHGADR

SEQ ID NO: 2382 - protein, 31 aa, Homo sapiens
DAGVQEPIYATIGAGVVNTIFTVVSLFLVER

SEQ ID NO: 2383 - protein, 13 aa, Homo sapiens
DGVMEMNSIEPAK

SEQ ID NO: 2384 - protein, 13 aa, Homo sapiens
DGVMEMNSIEPAK

SEQ ID NO: 2385 - protein, 13 aa, Homo sapiens
DGVMEMNSIEPAK

SEQ ID NO: 2386 - protein, 13 aa, Homo sapiens
DGVMEMNSIEPAK

SEQ ID NO: 2387 - protein, 6 aa, Homo sapiens
FLLINR

SEQ ID NO: 2388 - protein, 6 aa, Homo sapiens
FLLINR

SEQ ID NO: 2389 - protein, 6 aa, Homo sapiens
FLLINR

SEQ ID NO: 2390 - protein, 6 aa, Homo sapiens
FLLINR

SEQ ID NO: 2391 - protein, 15 aa, Homo sapiens
LWGTQDVSQDIQEMK

SEQ ID NO: 2392 - protein, 30 aa, Homo sapiens
QPIIISIVLQLSQQLSGINAVFYYSTGIFK

SEQ ID NO: 2393 - protein, 9 aa, Homo sapiens
QVTVLELFR

SEQ ID NO: 2394 - protein, 9 aa, Homo sapiens
QVTVLELFR

SEQ ID NO: 2395 - protein, 9 aa, Homo sapiens
QVTVLELFR

SEQ ID NO: 2396 - protein, 9 aa, Homo sapiens
QVTVLELFR

SEQ ID NO: 2397 - protein, 9 aa, Homo sapiens
SVEMLILGR

SEQ ID NO: 2398 - protein, 9 aa, Homo sapiens
SVEMLILGR

SEQ ID NO: 2399 - protein, 9 aa, Homo sapiens
SVEMLILGR

SEQ ID NO: 2400 - protein, 9 aa, Homo sapiens
SVEMLILGR

SEQ ID NO: 2401 - protein, 7 aa, Homo sapiens
TFEDITR

SEQ ID NO: 2402 - protein, 7 aa, Homo sapiens
TFEDITR

SEQ ID NO: 2403 - protein, 7 aa, Homo sapiens
TFEDITR

SEQ ID NO: 2404 - protein, 7 aa, Homo sapiens
TFEDITR

SEQ ID NO: 2405 - protein, 31 aa, Homo sapiens
VTPALIFAITVATIGSFQFGYNTGVINAPEK

SEQ ID NO: 2406 - protein, 9 aa, Homo sapiens
AGLQFPVGR

SEQ ID NO: 2407 - protein, 7 aa, Homo sapiens
HLQLAIR

SEQ ID NO: 2408 - protein, 7 aa, Homo sapiens
NDEELNK

SEQ ID NO: 2409 - protein, 7 aa, Homo sapiens
NDEELNK

SEQ ID NO: 2410 - protein, 7 aa, Homo sapiens
NDEELNK

SEQ ID NO: 2411 - protein, 7 aa, Homo sapiens
NDEELNK

SEQ ID NO: 2412 - protein, 29 aa, Homo sapiens
VGAGAPVYLAAVLEYLTAEILELAGNAAR

SEQ ID NO: 2413 - protein, 29 aa, Homo sapiens
VGAGAPVYLAAVLEYLTAEILELAGNAAR

SEQ ID NO: 2414 - protein, 29 aa, Homo sapiens
VGAGAPVYLAAVLEYLTAEILELAGNAAR

SEQ ID NO: 2415 - protein, 29 aa, Homo sapiens
VGAGAPVYLAAVLEYLTAEILELAGNAAR

SEQ ID NO: 2416 - protein, 9 aa, Homo sapiens
AGLQFPVGR

SEQ ID NO: 2417 - protein, 7 aa, Homo sapiens
HLQLAIR

SEQ ID NO: 2418 - protein, 7 aa, Homo sapiens
NDEELNK

SEQ ID NO: 2419 - protein, 7 aa, Homo sapiens
NDEELNK

SEQ ID NO: 2420 - protein, 7 aa, Homo sapiens
NDEELNK

SEQ ID NO: 2421 - protein, 7 aa, Homo sapiens
NDEELNK

SEQ ID NO: 2422 - protein, 29 aa, Homo sapiens
VGAGAPVYLAAVLEYLTAEILELAGNAAR

SEQ ID NO: 2423 - protein, 29 aa, Homo sapiens
VGAGAPVYLAAVLEYLTAEILELAGNAAR

SEQ ID NO: 2424 - protein, 29 aa, Homo sapiens
VGAGAPVYLAAVLEYLTAEILELAGNAAR

SEQ ID NO: 2425 - protein, 29 aa, Homo sapiens
VGAGAPVYLAAVLEYLTAEILELAGNAAR

SEQ ID NO: 2426 - protein, 9 aa, Homo sapiens
AGLQFPVGR

SEQ ID NO: 2427 - protein, 7 aa, Homo sapiens
HLQLAIR

SEQ ID NO: 2428 - protein, 7 aa, Homo sapiens
NDEELNK

SEQ ID NO: 2429 - protein, 7 aa, Homo sapiens
NDEELNK

SEQ ID NO: 2430 - protein, 7 aa, Homo sapiens
NDEELNK

SEQ ID NO: 2431 - protein, 7 aa, Homo sapiens
NDEELNK

SEQ ID NO: 2432 - protein, 29 aa, Homo sapiens
VGAGAPVYLAAVLEYLTAEILELAGNAAR

SEQ ID NO: 2433 - protein, 29 aa, Homo sapiens
VGAGAPVYLAAVLEYLTAEILELAGNAAR

SEQ ID NO: 2434 - protein, 29 aa, Homo sapiens
VGAGAPVYLAAVLEYLTAEILELAGNAAR

SEQ ID NO: 2435 - protein, 29 aa, Homo sapiens
VGAGAPVYLAAVLEYLTAEILELAGNAAR

SEQ ID NO: 2436 - protein, 9 aa, Homo sapiens
AGLQFPVGR

SEQ ID NO: 2437 - protein, 7 aa, Homo sapiens
HLQLAIR

SEQ ID NO: 2438 - protein, 7 aa, Homo sapiens
NDEELNK

SEQ ID NO: 2439 - protein, 7 aa, Homo sapiens
NDEELNK

SEQ ID NO: 2440 - protein, 7 aa, Homo sapiens
NDEELNK

SEQ ID NO: 2441 - protein, 7 aa, Homo sapiens
NDEELNK

SEQ ID NO: 2442 - protein, 29 aa, Homo sapiens
VGAGAPVYLAAVLEYLTAEILELAGNAAR

SEQ ID NO: 2443 - protein, 29 aa, Homo sapiens
VGAGAPVYLAAVLEYLTAEILELAGNAAR

SEQ ID NO: 2444 - protein, 29 aa, Homo sapiens
VGAGAPVYLAAVLEYLTAEILELAGNAAR

SEQ ID NO: 2445 - protein, 29 aa, Homo sapiens
VGAGAPVYLAAVLEYLTAEILELAGNAAR

SEQ ID NO: 2446 - protein, 31 aa, Homo sapiens
GALYTGFSILVTLLLAGQATTAYFLYQQQGR

SEQ ID NO: 2447 - protein, 8 aa, Homo sapiens
GSFPENLR

SEQ ID NO: 2448 - protein, 13 aa, Homo sapiens
HSLEQKPTDAPPK

SEQ ID NO: 2449 - protein, 13 aa, Homo sapiens
HSLEQKPTDAPPK

SEQ ID NO: 2450 - protein, 13 aa, Homo sapiens
HSLEQKPTDAPPK

SEQ ID NO: 2451 - protein, 13 aa, Homo sapiens
HSLEQKPTDAPPK

SEQ ID NO: 2452 - protein, 10 aa, Homo sapiens
LPKPPKPVSK

SEQ ID NO: 2453 - protein, 10 aa, Homo sapiens
LPKPPKPVSK

SEQ ID NO: 2454 - protein, 10 aa, Homo sapiens
LPKPPKPVSK

SEQ ID NO: 2455 - protein, 10 aa, Homo sapiens
LPKPPKPVSK

SEQ ID NO: 2456 - protein, 14 aa, Homo sapiens
LTVTSQNLQLENLR

SEQ ID NO: 2457 - protein, 14 aa, Homo sapiens
LTVTSQNLQLENLR

SEQ ID NO: 2458 - protein, 14 aa, Homo sapiens
LTVTSQNLQLENLR

SEQ ID NO: 2459 - protein, 14 aa, Homo sapiens
LTVTSQNLQLENLR

SEQ ID NO: 2460 - protein, 14 aa, Homo sapiens
DYEAWLGIHDVHGR

SEQ ID NO: 2461 - protein, 14 aa, Homo sapiens
DYEAWLGIHDVHGR

SEQ ID NO: 2462 - protein, 14 aa, Homo sapiens
DYEAWLGIHDVHGR

SEQ ID NO: 2463 - protein, 14 aa, Homo sapiens
DYEAWLGIHDVHGR

SEQ ID NO: 2464 - protein, 8 aa, Homo sapiens
ESWVLTAR

SEQ ID NO: 2465 - protein, 8 aa, Homo sapiens
ESWVLTAR

SEQ ID NO: 2466 - protein, 8 aa, Homo sapiens
ESWVLTAR

SEQ ID NO: 2467 - protein, 8 aa, Homo sapiens
ESWVLTAR

SEQ ID NO: 2468 - protein, 10 aa, Homo sapiens
HIFWEPDASK

SEQ ID NO: 2469 - protein, 10 aa, Homo sapiens
HIFWEPDASK

SEQ ID NO: 2470 - protein, 10 aa, Homo sapiens
HIFWEPDASK

SEQ ID NO: 2471 - protein, 10 aa, Homo sapiens
HIFWEPDASK

SEQ ID NO: 2472 - protein, 8 aa, Homo sapiens
VVNGIPTR

SEQ ID NO: 2473 - protein, 8 aa, Homo sapiens
VVNGIPTR

SEQ ID NO: 2474 - protein, 8 aa, Homo sapiens
VVNGIPTR

SEQ ID NO: 2475 - protein, 8 aa, Homo sapiens
VVNGIPTR

SEQ ID NO: 2476 - protein, 8 aa, Homo sapiens
WDHQTPHR

SEQ ID NO: 2477 - protein, 8 aa, Homo sapiens
WDHQTPHR

SEQ ID NO: 2478 - protein, 8 aa, Homo sapiens
WDHQTPHR

SEQ ID NO: 2479 - protein, 8 aa, Homo sapiens
WDHQTPHR

SEQ ID NO: 2480 - protein, 15 aa, Homo sapiens
EEEEGISQESSEEEQ

SEQ ID NO: 2481 - protein, 8 aa, Homo sapiens
SSQPLASK

SEQ ID NO: 2482 - protein, 8 aa, Homo sapiens
SSQPLASK

SEQ ID NO: 2483 - protein, 8 aa, Homo sapiens
SSQPLASK

SEQ ID NO: 2484 - protein, 8 aa, Homo sapiens
SSQPLASK

SEQ ID NO: 2485 - protein, 10 aa, Homo sapiens
FFADLLDYIK

SEQ ID NO: 2486 - protein, 10 aa, Homo sapiens
FFADLLDYIK

SEQ ID NO: 2487 - protein, 10 aa, Homo sapiens
FFADLLDYIK

SEQ ID NO: 2488 - protein, 10 aa, Homo sapiens
FFADLLDYIK

SEQ ID NO: 2489 - protein, 14 aa, Homo sapiens
FVVGYALDYNEYFR

SEQ ID NO: 2490 - protein, 14 aa, Homo sapiens
FVVGYALDYNEYFR

SEQ ID NO: 2491 - protein, 14 aa, Homo sapiens
FVVGYALDYNEYFR

SEQ ID NO: 2492 - protein, 14 aa, Homo sapiens
FVVGYALDYNEYFR

SEQ ID NO: 2493 - protein, 13 aa, Homo sapiens
NVLIVEDIIDTGK

SEQ ID NO: 2494 - protein, 13 aa, Homo sapiens
NVLIVEDIIDTGK

SEQ ID NO: 2495 - protein, 13 aa, Homo sapiens
NVLIVEDIIDTGK

SEQ ID NO: 2496 - protein, 13 aa, Homo sapiens
NVLIVEDIIDTGK

SEQ ID NO: 2497 - protein, 16 aa, Homo sapiens
SVGYKPDFVGFEIPDK

SEQ ID NO: 2498 - protein, 16 aa, Homo sapiens
SVGYKPDFVGFEIPDK

SEQ ID NO: 2499 - protein, 16 aa, Homo sapiens
SVGYKPDFVGFEIPDK

SEQ ID NO: 2500 - protein, 16 aa, Homo sapiens
SVGYKPDFVGFEIPDK

SEQ ID NO: 2501 - protein, 13 aa, Homo sapiens
VIGGDDLSTLTGK

SEQ ID NO: 2502 - protein, 13 aa, Homo sapiens
VIGGDDLSTLTGK

SEQ ID NO: 2503 - protein, 13 aa, Homo sapiens
VIGGDDLSTLTGK

SEQ ID NO: 2504 - protein, 13 aa, Homo sapiens
VIGGDDLSTLTGK

SEQ ID NO: 2505 - protein, 18 aa, Homo sapiens
EDFLNPDVLDIFISSVQK

SEQ ID NO: 2506 - protein, 9 aa, Homo sapiens
FLILLGSPK

SEQ ID NO: 2507 - protein, 9 aa, Homo sapiens
FLILLGSPK

SEQ ID NO: 2508 - protein, 9 aa, Homo sapiens
FLILLGSPK

SEQ ID NO: 2509 - protein, 9 aa, Homo sapiens
FLILLGSPK

SEQ ID NO: 2510 - protein, 8 aa, Homo sapiens
LPYPFSNK

SEQ ID NO: 2511 - protein, 8 aa, Homo sapiens
LPYPFSNK

SEQ ID NO: 2512 - protein, 8 aa, Homo sapiens
LPYPFSNK

SEQ ID NO: 2513 - protein, 8 aa, Homo sapiens
LPYPFSNK

SEQ ID NO: 2514 - protein, 10 aa, Homo sapiens
SVQLNGLTLK

SEQ ID NO: 2515 - protein, 10 aa, Homo sapiens
SVQLNGLTLK

SEQ ID NO: 2516 - protein, 10 aa, Homo sapiens
SVQLNGLTLK

SEQ ID NO: 2517 - protein, 10 aa, Homo sapiens
SVQLNGLTLK

SEQ ID NO: 2518 - protein, 14 aa, Homo sapiens
YLLRPLGPHGLLSK

SEQ ID NO: 2519 - protein, 14 aa, Homo sapiens
YLLRPLGPHGLLSK

SEQ ID NO: 2520 - protein, 14 aa, Homo sapiens
YLLRPLGPHGLLSK

SEQ ID NO: 2521 - protein, 14 aa, Homo sapiens
YLLRPLGPHGLLSK

SEQ ID NO: 2522 - protein, 7 aa, Homo sapiens
DYAEVGR

SEQ ID NO: 2523 - protein, 13 aa, Homo sapiens
TEGDGVYTLNNEK

SEQ ID NO: 2524 - protein, 13 aa, Homo sapiens
TEGDGVYTLNNEK

SEQ ID NO: 2525 - protein, 13 aa, Homo sapiens
TEGDGVYTLNNEK

SEQ ID NO: 2526 - protein, 13 aa, Homo sapiens
TEGDGVYTLNNEK

SEQ ID NO: 2527 - protein, 9 aa, Homo sapiens
VGYVSGWGR

SEQ ID NO: 2528 - protein, 9 aa, Homo sapiens
VGYVSGWGR

SEQ ID NO: 2529 - protein, 9 aa, Homo sapiens
VGYVSGWGR

SEQ ID NO: 2530 - protein, 9 aa, Homo sapiens
VGYVSGWGR

SEQ ID NO: 2531 - protein, 10 aa, Homo sapiens
VTSIQDWVQK

SEQ ID NO: 2532 - protein, 10 aa, Homo sapiens
VTSIQDWVQK

SEQ ID NO: 2533 - protein, 10 aa, Homo sapiens
VTSIQDWVQK

SEQ ID NO: 2534 - protein, 10 aa, Homo sapiens
VTSIQDWVQK

SEQ ID NO: 2535 - protein, 16 aa, Homo sapiens
VVLHPNYSQVDIGLIK

SEQ ID NO: 2536 - protein, 16 aa, Homo sapiens
VVLHPNYSQVDIGLIK

SEQ ID NO: 2537 - protein, 16 aa, Homo sapiens
VVLHPNYSQVDIGLIK

SEQ ID NO: 2538 - protein, 16 aa, Homo sapiens
VVLHPNYSQVDIGLIK

SEQ ID NO: 2539 - protein, 11 aa, Homo sapiens
DNSTMGYMAAK

SEQ ID NO: 2540 - protein, 11 aa, Homo sapiens
DNSTMGYMAAK

SEQ ID NO: 2541 - protein, 11 aa, Homo sapiens
DNSTMGYMAAK

SEQ ID NO: 2542 - protein, 11 aa, Homo sapiens
DNSTMGYMAAK

SEQ ID NO: 2543 - protein, 15 aa, Homo sapiens
HLEINPDHSIIETLR

SEQ ID NO: 2544 - protein, 15 aa, Homo sapiens
HLEINPDHSIIETLR

SEQ ID NO: 2545 - protein, 15 aa, Homo sapiens
HLEINPDHSIIETLR

SEQ ID NO: 2546 - protein, 15 aa, Homo sapiens
HLEINPDHSIIETLR

SEQ ID NO: 2547 - protein, 15 aa, Homo sapiens
HLEINPDHSIIETLR

SEQ ID NO: 2548 - protein, 15 aa, Homo sapiens
HLEINPDHSIIETLR

SEQ ID NO: 2549 - protein, 15 aa, Homo sapiens
HLEINPDHSIIETLR

SEQ ID NO: 2550 - protein, 13 aa, Homo sapiens
SLTNDWEDHLAVK

SEQ ID NO: 2551 - protein, 13 aa, Homo sapiens
SLTNDWEDHLAVK

SEQ ID NO: 2552 - protein, 13 aa, Homo sapiens
SLTNDWEDHLAVK

SEQ ID NO: 2553 - protein, 13 aa, Homo sapiens
SLTNDWEDHLAVK

SEQ ID NO: 2554 - protein, 13 aa, Homo sapiens
TLTIVDTGIGMTK

SEQ ID NO: 2555 - protein, 13 aa, Homo sapiens
TLTIVDTGIGMTK

SEQ ID NO: 2556 - protein, 13 aa, Homo sapiens
TLTIVDTGIGMTK

SEQ ID NO: 2557 - protein, 13 aa, Homo sapiens
TLTIVDTGIGMTK

SEQ ID NO: 2558 - protein, 9 aa, Homo sapiens
ADHGEPIGR

SEQ ID NO: 2559 - protein, 9 aa, Homo sapiens
ADHGEPIGR

SEQ ID NO: 2560 - protein, 9 aa, Homo sapiens
ADHGEPIGR

SEQ ID NO: 2561 - protein, 9 aa, Homo sapiens
ADHGEPIGR

SEQ ID NO: 2562 - protein, 27 aa, Homo sapiens
DLVVLLFETALLSSGFSLEDPQTHSNR

SEQ ID NO: 2563 - protein, 10 aa, Homo sapiens
IDIIPNPQER

SEQ ID NO: 2564 - protein, 10 aa, Homo sapiens
IDIIPNPQER

SEQ ID NO: 2565 - protein, 10 aa, Homo sapiens
IDIIPNPQER

SEQ ID NO: 2566 - protein, 10 aa, Homo sapiens
IDIIPNPQER

SEQ ID NO: 2567 - protein, 34 aa, Homo sapiens
LGLGIDEDEVAAEEPNAAVPDEIPPLEGDEDASR

SEQ ID NO: 2568 - protein, 15 aa, Homo sapiens
NPDDITQEEYGEFYK

SEQ ID NO: 2569 - protein, 15 aa, Homo sapiens
NPDDITQEEYGEFYK

SEQ ID NO: 2570 - protein, 15 aa, Homo sapiens
NPDDITQEEYGEFYK

SEQ ID NO: 2571 - protein, 15 aa, Homo sapiens
NPDDITQEEYGEFYK

SEQ ID NO: 2572 - protein, 10 aa, Homo sapiens
AQLGGPEAAK

SEQ ID NO: 2573 - protein, 10 aa, Homo sapiens
AQLGGPEAAK

SEQ ID NO: 2574 - protein, 10 aa, Homo sapiens
AQLGGPEAAK

SEQ ID NO: 2575 - protein, 10 aa, Homo sapiens
AQLGGPEAAK

SEQ ID NO: 2576 - protein, 9 aa, Homo sapiens
DGVVEITGK

SEQ ID NO: 2577 - protein, 9 aa, Homo sapiens
DGVVEITGK

SEQ ID NO: 2578 - protein, 9 aa, Homo sapiens
DGVVEITGK

SEQ ID NO: 2579 - protein, 9 aa, Homo sapiens
DGVVEITGK

SEQ ID NO: 2580 - protein, 8 aa, Homo sapiens
GPSWDPFR

SEQ ID NO: 2581 - protein, 8 aa, Homo sapiens
GPSWDPFR

SEQ ID NO: 2582 - protein, 8 aa, Homo sapiens
GPSWDPFR

SEQ ID NO: 2583 - protein, 8 aa, Homo sapiens
GPSWDPFR

SEQ ID NO: 2584 - protein, 17 aa, Homo sapiens
LATQSNEITIPVTFESR

SEQ ID NO: 2585 - protein, 17 aa, Homo sapiens
LATQSNEITIPVTFESR

SEQ ID NO: 2586 - protein, 17 aa, Homo sapiens
LATQSNEITIPVTFESR

SEQ ID NO: 2587 - protein, 17 aa, Homo sapiens
LATQSNEITIPVTFESR

SEQ ID NO: 2588 - protein, 10 aa, Homo sapiens
LFDQAFGLPR

SEQ ID NO: 2589 - protein, 10 aa, Homo sapiens
LFDQAFGLPR

SEQ ID NO: 2590 - protein, 10 aa, Homo sapiens
LFDQAFGLPR

SEQ ID NO: 2591 - protein, 10 aa, Homo sapiens
LFDQAFGLPR

SEQ ID NO: 2592 - protein, 9 aa, Homo sapiens
QDEHGYISR

SEQ ID NO: 2593 - protein, 9 aa, Homo sapiens
QDEHGYISR

SEQ ID NO: 2594 - protein, 9 aa, Homo sapiens
QDEHGYISR

SEQ ID NO: 2595 - protein, 9 aa, Homo sapiens
QDEHGYISR

SEQ ID NO: 2596 - protein, 10 aa, Homo sapiens
QLSSGVSEIR

SEQ ID NO: 2597 - protein, 10 aa, Homo sapiens
QLSSGVSEIR

SEQ ID NO: 2598 - protein, 10 aa, Homo sapiens
QLSSGVSEIR

SEQ ID NO: 2599 - protein, 10 aa, Homo sapiens
QLSSGVSEIR

SEQ ID NO: 2600 - protein, 7 aa, Homo sapiens
VPFSLLR

SEQ ID NO: 2601 - protein, 7 aa, Homo sapiens
VPFSLLR

SEQ ID NO: 2602 - protein, 7 aa, Homo sapiens
VPFSLLR

SEQ ID NO: 2603 - protein, 7 aa, Homo sapiens
VPFSLLR

SEQ ID NO: 2604 - protein, 16 aa, Homo sapiens
VSLDVNHFAPDELTVK

SEQ ID NO: 2605 - protein, 16 aa, Homo sapiens
VSLDVNHFAPDELTVK

SEQ ID NO: 2606 - protein, 16 aa, Homo sapiens
VSLDVNHFAPDELTVK

SEQ ID NO: 2607 - protein, 16 aa, Homo sapiens
VSLDVNHFAPDELTVK

SEQ ID NO: 2608 - protein, 30 aa, Homo sapiens
YTLPPGVDPTQVSSSLSPEGTLTVEAPMPK

SEQ ID NO: 2609 - protein, 11 aa, Homo sapiens
LHRPPVIVLQR

SEQ ID NO: 2610 - protein, 11 aa, Homo sapiens
LHRPPVIVLQR

SEQ ID NO: 2611 - protein, 11 aa, Homo sapiens
LHRPPVIVLQR

SEQ ID NO: 2612 - protein, 11 aa, Homo sapiens
LHRPPVIVLQR

SEQ ID NO: 2613 - protein, 8 aa, Homo sapiens
LPVLLLGR

SEQ ID NO: 2614 - protein, 8 aa, Homo sapiens
LPVLLLGR

SEQ ID NO: 2615 - protein, 8 aa, Homo sapiens
LPVLLLGR

SEQ ID NO: 2616 - protein, 8 aa, Homo sapiens
LPVLLLGR

SEQ ID NO: 2617 - protein, 33 aa, Homo sapiens
SSELRPGEFVVAIGSPFSLQNTVTTGIVSTTQR

SEQ ID NO: 2618 - protein, 13 aa, Homo sapiens
VTAGISFAIPSDK

SEQ ID NO: 2619 - protein, 13 aa, Homo sapiens
VTAGISFAIPSDK

SEQ ID NO: 2620 - protein, 13 aa, Homo sapiens
VTAGISFAIPSDK

SEQ ID NO: 2621 - protein, 13 aa, Homo sapiens
VTAGISFAIPSDK

SEQ ID NO: 2622 - protein, 10 aa, Homo sapiens
YNFIADVVEK

SEQ ID NO: 2623 - protein, 10 aa, Homo sapiens
YNFIADVVEK

SEQ ID NO: 2624 - protein, 10 aa, Homo sapiens
YNFIADVVEK

SEQ ID NO: 2625 - protein, 10 aa, Homo sapiens
YNFIADVVEK

SEQ ID NO: 2626 - protein, 9 aa, Homo sapiens
DFNPTATVK

SEQ ID NO: 2627 - protein, 10 aa, Homo sapiens
FLLSESGSGK

SEQ ID NO: 2628 - protein, 10 aa, Homo sapiens
FLLSESGSGK

SEQ ID NO: 2629 - protein, 10 aa, Homo sapiens
FLLSESGSGK

SEQ ID NO: 2630 - protein, 10 aa, Homo sapiens
FLLSESGSGK

SEQ ID NO: 2631 - protein, 11 aa, Homo sapiens
HIDLVEGDEGR

SEQ ID NO: 2632 - protein, 11 aa, Homo sapiens
HIDLVEGDEGR

SEQ ID NO: 2633 - protein, 11 aa, Homo sapiens
HIDLVEGDEGR

SEQ ID NO: 2634 - protein, 11 aa, Homo sapiens
HIDLVEGDEGR

SEQ ID NO: 2635 - protein, 11 aa, Homo sapiens
LVDEYSLNAGK

SEQ ID NO: 2636 - protein, 11 aa, Homo sapiens
LVDEYSLNAGK

SEQ ID NO: 2637 - protein, 11 aa, Homo sapiens
LVDEYSLNAGK

SEQ ID NO: 2638 - protein, 11 aa, Homo sapiens
LVDEYSLNAGK

SEQ ID NO: 2639 - protein, 15 aa, Homo sapiens
SANLVAATLGAILNR

SEQ ID NO: 2640 - protein, 15 aa, Homo sapiens
SANLVAATLGAILNR

SEQ ID NO: 2641 - protein, 15 aa, Homo sapiens
SANLVAATLGAILNR

SEQ ID NO: 2642 - protein, 15 aa, Homo sapiens
SANLVAATLGAILNR

SEQ ID NO: 2643 - protein, 8 aa, Homo sapiens
HPDWPPDR

SEQ ID NO: 2644 - protein, 28 aa, Homo sapiens
NDQLAWLWAESTALFPSVYLDETLASSR

SEQ ID NO: 2645 - protein, 30 aa, Homo sapiens
QAAGGASEAWAGSHLTSLLALAALAFTWTL

SEQ ID NO: 2646 - protein, 21 aa, Homo sapiens
TQESAGLAVIDWEDWRPVWVR

SEQ ID NO: 2647 - protein, 21 aa, Homo sapiens
TQESAGLAVIDWEDWRPVWVR

SEQ ID NO: 2648 - protein, 21 aa, Homo sapiens
TQESAGLAVIDWEDWRPVWVR

SEQ ID NO: 2649 - protein, 21 aa, Homo sapiens
TQESAGLAVIDWEDWRPVWVR

SEQ ID NO: 2650 - protein, 28 aa, Homo sapiens
VPLDLNAFDVQASPNEGFVNQNITIFYR

SEQ ID NO: 2651 - protein, 12 aa, Homo sapiens
FFGDSAASMAIK

SEQ ID NO: 2652 - protein, 12 aa, Homo sapiens
FFGDSAASMAIK

SEQ ID NO: 2653 - protein, 12 aa, Homo sapiens
FFGDSAASMAIK

SEQ ID NO: 2654 - protein, 12 aa, Homo sapiens
FFGDSAASMAIK

SEQ ID NO: 2655 - protein, 12 aa, Homo sapiens
FPEHELTFDPQR

SEQ ID NO: 2656 - protein, 12 aa, Homo sapiens
FPEHELTFDPQR

SEQ ID NO: 2657 - protein, 12 aa, Homo sapiens
FPEHELTFDPQR

SEQ ID NO: 2658 - protein, 12 aa, Homo sapiens
FPEHELTFDPQR

SEQ ID NO: 2659 - protein, 9 aa, Homo sapiens
LAGLFNEQR

SEQ ID NO: 2660 - protein, 9 aa, Homo sapiens
LAGLFNEQR

SEQ ID NO: 2661 - protein, 9 aa, Homo sapiens
LAGLFNEQR

SEQ ID NO: 2662 - protein, 9 aa, Homo sapiens
LAGLFNEQR

SEQ ID NO: 2663 - protein, 18 aa, Homo sapiens
LGNTISSLFGGGTTPDAK

SEQ ID NO: 2664 - protein, 18 aa, Homo sapiens
LGNTISSLFGGGTTPDAK

SEQ ID NO: 2665 - protein, 18 aa, Homo sapiens
LGNTISSLFGGGTTPDAK

SEQ ID NO: 2666 - protein, 18 aa, Homo sapiens
LGNTISSLFGGGTTPDAK

SEQ ID NO: 2667 - protein, 12 aa, Homo sapiens
LPATEKPVLLSK

SEQ ID NO: 2668 - protein, 12 aa, Homo sapiens
LPATEKPVLLSK

SEQ ID NO: 2669 - protein, 12 aa, Homo sapiens
LPATEKPVLLSK

SEQ ID NO: 2670 - protein, 12 aa, Homo sapiens
LPATEKPVLLSK

SEQ ID NO: 2671 - protein, 12 aa, Homo sapiens
LPATEKPVLLSK

SEQ ID NO: 2672 - protein, 12 aa, Homo sapiens
LPATEKPVLLSK

SEQ ID NO: 2673 - protein, 12 aa, Homo sapiens
LPATEKPVLLSK

SEQ ID NO: 2674 - protein, 12 aa, Homo sapiens
LPATEKPVLLSK

SEQ ID NO: 2675 - protein, 16 aa, Homo sapiens
VAIVKPGVPMEIVLNK

SEQ ID NO: 2676 - protein, 16 aa, Homo sapiens
VAIVKPGVPMEIVLNK

SEQ ID NO: 2677 - protein, 16 aa, Homo sapiens
VAIVKPGVPMEIVLNK

SEQ ID NO: 2678 - protein, 16 aa, Homo sapiens
VAIVKPGVPMEIVLNK

SEQ ID NO: 2679 - protein, 16 aa, Homo sapiens
VAIVKPGVPMEIVLNK

SEQ ID NO: 2680 - protein, 16 aa, Homo sapiens
VAIVKPGVPMEIVLNK

SEQ ID NO: 2681 - protein, 16 aa, Homo sapiens
VAIVKPGVPMEIVLNK

SEQ ID NO: 2682 - protein, 16 aa, Homo sapiens
VAIVKPGVPMEIVLNK

SEQ ID NO: 2683 - protein, 6 aa, Homo sapiens
AEVLFR

SEQ ID NO: 2684 - protein, 6 aa, Homo sapiens
AEVLFR

SEQ ID NO: 2685 - protein, 6 aa, Homo sapiens
AEVLFR

SEQ ID NO: 2686 - protein, 6 aa, Homo sapiens
AEVLFR

SEQ ID NO: 2687 - protein, 6 aa, Homo sapiens
ELAVFR

SEQ ID NO: 2688 - protein, 6 aa, Homo sapiens
ELAVFR

SEQ ID NO: 2689 - protein, 6 aa, Homo sapiens
ELAVFR

SEQ ID NO: 2690 - protein, 6 aa, Homo sapiens
ELAVFR

SEQ ID NO: 2691 - protein, 7 aa, Homo sapiens
HGLYNLK

SEQ ID NO: 2692 - protein, 7 aa, Homo sapiens
HGLYNLK

SEQ ID NO: 2693 - protein, 7 aa, Homo sapiens
HGLYNLK

SEQ ID NO: 2694 - protein, 7 aa, Homo sapiens
HGLYNLK

SEQ ID NO: 2695 - protein, 9 aa, Homo sapiens
LIQGAPTIR

SEQ ID NO: 2696 - protein, 9 aa, Homo sapiens
LIQGAPTIR

SEQ ID NO: 2697 - protein, 9 aa, Homo sapiens
LIQGAPTIR

SEQ ID NO: 2698 - protein, 9 aa, Homo sapiens
LIQGAPTIR

SEQ ID NO: 2699 - protein, 6 aa, Homo sapiens
VTEQHR

SEQ ID NO: 2700 - protein, 6 aa, Homo sapiens
VTEQHR

SEQ ID NO: 2701 - protein, 6 aa, Homo sapiens
VTEQHR

SEQ ID NO: 2702 - protein, 6 aa, Homo sapiens
VTEQHR

SEQ ID NO: 2703 - protein, 20 aa, Homo sapiens
AYLLPAPPAPGNASESEEDR

SEQ ID NO: 2704 - protein, 20 aa, Homo sapiens
AYLLPAPPAPGNASESEEDR

SEQ ID NO: 2705 - protein, 20 aa, Homo sapiens
AYLLPAPPAPGNASESEEDR

SEQ ID NO: 2706 - protein, 20 aa, Homo sapiens
AYLLPAPPAPGNASESEEDR

SEQ ID NO: 2707 - protein, 7 aa, Homo sapiens
FHPLHSK

SEQ ID NO: 2708 - protein, 7 aa, Homo sapiens
FHPLHSK

SEQ ID NO: 2709 - protein, 7 aa, Homo sapiens
FHPLHSK

SEQ ID NO: 2710 - protein, 7 aa, Homo sapiens
FHPLHSK

SEQ ID NO: 2711 - protein, 8 aa, Homo sapiens
FLNVLSPR

SEQ ID NO: 2712 - protein, 8 aa, Homo sapiens
FLNVLSPR

SEQ ID NO: 2713 - protein, 8 aa, Homo sapiens
FLNVLSPR

SEQ ID NO: 2714 - protein, 8 aa, Homo sapiens
FLNVLSPR

SEQ ID NO: 2715 - protein, 15 aa, Homo sapiens
SAGSVESPSVSSTHR

SEQ ID NO: 2716 - protein, 15 aa, Homo sapiens
SAGSVESPSVSSTHR

SEQ ID NO: 2717 - protein, 15 aa, Homo sapiens
SAGSVESPSVSSTHR

SEQ ID NO: 2718 - protein, 15 aa, Homo sapiens
SAGSVESPSVSSTHR

SEQ ID NO: 2719 - protein, 11 aa, Homo sapiens
YGQPLPGYTTK

SEQ ID NO: 2720 - protein, 11 aa, Homo sapiens
YGQPLPGYTTK

SEQ ID NO: 2721 - protein, 11 aa, Homo sapiens
YGQPLPGYTTK

SEQ ID NO: 2722 - protein, 11 aa, Homo sapiens
YGQPLPGYTTK

SEQ ID NO: 2723 - protein, 14 aa, Homo sapiens
ASVSVTAEDEGTQR

SEQ ID NO: 2724 - protein, 14 aa, Homo sapiens
ASVSVTAEDEGTQR

SEQ ID NO: 2725 - protein, 14 aa, Homo sapiens
ASVSVTAEDEGTQR

SEQ ID NO: 2726 - protein, 14 aa, Homo sapiens
ASVSVTAEDEGTQR

SEQ ID NO: 2727 - protein, 16 aa, Homo sapiens
DGTFPLPIGESVTVTR

SEQ ID NO: 2728 - protein, 16 aa, Homo sapiens
DGTFPLPIGESVTVTR

SEQ ID NO: 2729 - protein, 16 aa, Homo sapiens
DGTFPLPIGESVTVTR

SEQ ID NO: 2730 - protein, 16 aa, Homo sapiens
DGTFPLPIGESVTVTR

SEQ ID NO: 2731 - protein, 15 aa, Homo sapiens
LNPTVTYGNDSFSAK

SEQ ID NO: 2732 - protein, 15 aa, Homo sapiens
LNPTVTYGNDSFSAK

SEQ ID NO: 2733 - protein, 15 aa, Homo sapiens
LNPTVTYGNDSFSAK

SEQ ID NO: 2734 - protein, 15 aa, Homo sapiens
LNPTVTYGNDSFSAK

SEQ ID NO: 2735 - protein, 11 aa, Homo sapiens
TFLTVYWTPER

SEQ ID NO: 2736 - protein, 11 aa, Homo sapiens
TFLTVYWTPER

SEQ ID NO: 2737 - protein, 11 aa, Homo sapiens
TFLTVYWTPER

SEQ ID NO: 2738 - protein, 11 aa, Homo sapiens
TFLTVYWTPER

SEQ ID NO: 2739 - protein, 14 aa, Homo sapiens
VELAPLPSWQPVGK

SEQ ID NO: 2740 - protein, 14 aa, Homo sapiens
VELAPLPSWQPVGK

SEQ ID NO: 2741 - protein, 14 aa, Homo sapiens
VELAPLPSWQPVGK

SEQ ID NO: 2742 - protein, 14 aa, Homo sapiens
VELAPLPSWQPVGK

SEQ ID NO: 2743 - protein, 7 aa, Homo sapiens
ADQEGAR

SEQ ID NO: 2744 - protein, 7 aa, Homo sapiens
ADQEGAR

SEQ ID NO: 2745 - protein, 7 aa, Homo sapiens
ADQEGAR

SEQ ID NO: 2746 - protein, 7 aa, Homo sapiens
ADQEGAR

SEQ ID NO: 2747 - protein, 23 aa, Homo sapiens
EESTYLPLTSMQPTEAMGEEPSR

SEQ ID NO: 2748 - protein, 23 aa, Homo sapiens
EESTYLPLTSMQPTEAMGEEPSR

SEQ ID NO: 2749 - protein, 23 aa, Homo sapiens
EESTYLPLTSMQPTEAMGEEPSR

SEQ ID NO: 2750 - protein, 23 aa, Homo sapiens
EESTYLPLTSMQPTEAMGEEPSR

SEQ ID NO: 2751 - protein, 8 aa, Homo sapiens
GNPYPELR

SEQ ID NO: 2752 - protein, 8 aa, Homo sapiens
GNPYPELR

SEQ ID NO: 2753 - protein, 8 aa, Homo sapiens
GNPYPELR

SEQ ID NO: 2754 - protein, 8 aa, Homo sapiens
GNPYPELR

SEQ ID NO: 2755 - protein, 9 aa, Homo sapiens
IALETSLSK

SEQ ID NO: 2756 - protein, 9 aa, Homo sapiens
IALETSLSK

SEQ ID NO: 2757 - protein, 9 aa, Homo sapiens
IALETSLSK

SEQ ID NO: 2758 - protein, 9 aa, Homo sapiens
IALETSLSK

SEQ ID NO: 2759 - protein, 18 aa, Homo sapiens
QPAVEEPAEVTATVLASR

SEQ ID NO: 2760 - protein, 20 aa, Homo sapiens
TELDMQPQGLGLFVNTSAPR

SEQ ID NO: 2761 - protein, 10 aa, Homo sapiens
TFVLPVTPPR

SEQ ID NO: 2762 - protein, 10 aa, Homo sapiens
TFVLPVTPPR

SEQ ID NO: 2763 - protein, 10 aa, Homo sapiens
TFVLPVTPPR

SEQ ID NO: 2764 - protein, 10 aa, Homo sapiens
TFVLPVTPPR

SEQ ID NO: 2765 - protein, 19 aa, Homo sapiens
VELAPLPPWQPVGQNFTLR

SEQ ID NO: 2766 - protein, 30 aa, Homo sapiens
VQVTLDGVPAAAPGQPAQLQLNATESDDGR

SEQ ID NO: 2767 - protein, 8 aa, Homo sapiens
ATDFVADR

SEQ ID NO: 2768 - protein, 8 aa, Homo sapiens
ATDFVADR

SEQ ID NO: 2769 - protein, 8 aa, Homo sapiens
ATDFVADR

SEQ ID NO: 2770 - protein, 8 aa, Homo sapiens
ATDFVADR

SEQ ID NO: 2771 - protein, 9 aa, Homo sapiens
DIFQEIFDK

SEQ ID NO: 2772 - protein, 9 aa, Homo sapiens
DIFQEIFDK

SEQ ID NO: 2773 - protein, 9 aa, Homo sapiens
DIFQEIFDK

SEQ ID NO: 2774 - protein, 9 aa, Homo sapiens
DIFQEIFDK

SEQ ID NO: 2775 - protein, 7 aa, Homo sapiens
IIWQFIK

SEQ ID NO: 2776 - protein, 7 aa, Homo sapiens
IIWQFIK

SEQ ID NO: 2777 - protein, 7 aa, Homo sapiens
IIWQFIK

SEQ ID NO: 2778 - protein, 7 aa, Homo sapiens
IIWQFIK

SEQ ID NO: 2779 - protein, 11 aa, Homo sapiens
LILPHVDIQLK

SEQ ID NO: 2780 - protein, 11 aa, Homo sapiens
LILPHVDIQLK

SEQ ID NO: 2781 - protein, 11 aa, Homo sapiens
LILPHVDIQLK

SEQ ID NO: 2782 - protein, 11 aa, Homo sapiens
LILPHVDIQLK

SEQ ID NO: 2783 - protein, 9 aa, Homo sapiens
YFDLGLPNR

SEQ ID NO: 2784 - protein, 9 aa, Homo sapiens
YFDLGLPNR

SEQ ID NO: 2785 - protein, 9 aa, Homo sapiens
YFDLGLPNR

SEQ ID NO: 2786 - protein, 9 aa, Homo sapiens
YFDLGLPNR

SEQ ID NO: 2787 - protein, 16 aa, Homo sapiens
GIYAYGFEKPSAIQQR

SEQ ID NO: 2788 - protein, 16 aa, Homo sapiens
GIYAYGFEKPSAIQQR

SEQ ID NO: 2789 - protein, 16 aa, Homo sapiens
GIYAYGFEKPSAIQQR

SEQ ID NO: 2790 - protein, 14 aa, Homo sapiens
GYDVIAQAQSGTGK

SEQ ID NO: 2791 - protein, 14 aa, Homo sapiens
GYDVIAQAQSGTGK

SEQ ID NO: 2792 - protein, 14 aa, Homo sapiens
GYDVIAQAQSGTGK

SEQ ID NO: 2793 - protein, 14 aa, Homo sapiens
GYDVIAQAQSGTGK

SEQ ID NO: 2794 - protein, 15 aa, Homo sapiens
LQMEAPHIIVGTPGR

SEQ ID NO: 2795 - protein, 15 aa, Homo sapiens
LQMEAPHIIVGTPGR

SEQ ID NO: 2796 - protein, 15 aa, Homo sapiens
LQMEAPHIIVGTPGR

SEQ ID NO: 2797 - protein, 15 aa, Homo sapiens
LQMEAPHIIVGTPGR

SEQ ID NO: 2798 - protein, 15 aa, Homo sapiens
LQMEAPHIIVGTPGR

SEQ ID NO: 2799 - protein, 15 aa, Homo sapiens
LQMEAPHIIVGTPGR

SEQ ID NO: 2800 - protein, 15 aa, Homo sapiens
LQMEAPHIIVGTPGR

SEQ ID NO: 2801 - protein, 15 aa, Homo sapiens
LQMEAPHIIVGTPGR

SEQ ID NO: 2802 - protein, 13 aa, Homo sapiens
MFVLDEADEMLSR

SEQ ID NO: 2803 - protein, 13 aa, Homo sapiens
MFVLDEADEMLSR

SEQ ID NO: 2804 - protein, 13 aa, Homo sapiens
MFVLDEADEMLSR

SEQ ID NO: 2805 - protein, 13 aa, Homo sapiens
MFVLDEADEMLSR

SEQ ID NO: 2806 - protein, 7 aa, Homo sapiens
VFDMLNR

SEQ ID NO: 2807 - protein, 7 aa, Homo sapiens
VFDMLNR

SEQ ID NO: 2808 - protein, 7 aa, Homo sapiens
VFDMLNR

SEQ ID NO: 2809 - protein, 7 aa, Homo sapiens
VFDMLNR

SEQ ID NO: 2810 - protein, 10 aa, Homo sapiens
VLITTDLLAR

SEQ ID NO: 2811 - protein, 10 aa, Homo sapiens
VLITTDLLAR

SEQ ID NO: 2812 - protein, 10 aa, Homo sapiens
VLITTDLLAR

SEQ ID NO: 2813 - protein, 10 aa, Homo sapiens
VLITTDLLAR

SEQ ID NO: 2814 - protein, 10 aa, Homo sapiens
EGTEASLQIR

SEQ ID NO: 2815 - protein, 10 aa, Homo sapiens
EGTEASLQIR

SEQ ID NO: 2816 - protein, 10 aa, Homo sapiens
EGTEASLQIR

SEQ ID NO: 2817 - protein, 10 aa, Homo sapiens
EGTEASLQIR

SEQ ID NO: 2818 - protein, 10 aa, Homo sapiens
ISSLPTQLFK

SEQ ID NO: 2819 - protein, 10 aa, Homo sapiens
ISSLPTQLFK

SEQ ID NO: 2820 - protein, 10 aa, Homo sapiens
ISSLPTQLFK

SEQ ID NO: 2821 - protein, 10 aa, Homo sapiens
ISSLPTQLFK

SEQ ID NO: 2822 - protein, 8 aa, Homo sapiens
THPGGEQK

SEQ ID NO: 2823 - protein, 8 aa, Homo sapiens
THPGGEQK

SEQ ID NO: 2824 - protein, 8 aa, Homo sapiens
THPGGEQK

SEQ ID NO: 2825 - protein, 8 aa, Homo sapiens
THPGGEQK

SEQ ID NO: 2826 - protein, 8 aa, Homo sapiens
YQPPSTNK

SEQ ID NO: 2827 - protein, 11 aa, Homo sapiens
LEPLVNDLTLR

SEQ ID NO: 2828 - protein, 11 aa, Homo sapiens
LEPLVNDLTLR

SEQ ID NO: 2829 - protein, 11 aa, Homo sapiens
LEPLVNDLTLR

SEQ ID NO: 2830 - protein, 11 aa, Homo sapiens
LEPLVNDLTLR

SEQ ID NO: 2831 - protein, 12 aa, Homo sapiens
LETNEFQQLQSK

SEQ ID NO: 2832 - protein, 12 aa, Homo sapiens
LETNEFQQLQSK

SEQ ID NO: 2833 - protein, 12 aa, Homo sapiens
LETNEFQQLQSK

SEQ ID NO: 2834 - protein, 12 aa, Homo sapiens
LETNEFQQLQSK

SEQ ID NO: 2835 - protein, 12 aa, Homo sapiens
NIGDLLSSSIDR

SEQ ID NO: 2836 - protein, 12 aa, Homo sapiens
NIGDLLSSSIDR

SEQ ID NO: 2837 - protein, 12 aa, Homo sapiens
NIGDLLSSSIDR

SEQ ID NO: 2838 - protein, 12 aa, Homo sapiens
NIGDLLSSSIDR

SEQ ID NO: 2839 - protein, 11 aa, Homo sapiens
SSGGGGWADPR

SEQ ID NO: 2840 - protein, 11 aa, Homo sapiens
SSGGGGWADPR

SEQ ID NO: 2841 - protein, 11 aa, Homo sapiens
SSGGGGWADPR

SEQ ID NO: 2842 - protein, 11 aa, Homo sapiens
SSGGGGWADPR

SEQ ID NO: 2843 - protein, 11 aa, Homo sapiens
TVTFANDLKPK

SEQ ID NO: 2844 - protein, 11 aa, Homo sapiens
TVTFANDLKPK

SEQ ID NO: 2845 - protein, 11 aa, Homo sapiens
TVTFANDLKPK

SEQ ID NO: 2846 - protein, 11 aa, Homo sapiens
TVTFANDLKPK

SEQ ID NO: 2847 - protein, 23 aa, Homo sapiens
FIDNTLYFIAEDDENLESDYFGK

SEQ ID NO: 2848 - protein, 8 aa, Homo sapiens
SDIIFFQR

SEQ ID NO: 2849 - protein, 8 aa, Homo sapiens
SDIIFFQR

SEQ ID NO: 2850 - protein, 8 aa, Homo sapiens
SDIIFFQR

SEQ ID NO: 2851 - protein, 8 aa, Homo sapiens
SDIIFFQR

SEQ ID NO: 2852 - protein, 8 aa, Homo sapiens
SVPGHDNK

SEQ ID NO: 2853 - protein, 8 aa, Homo sapiens
SVPGHDNK

SEQ ID NO: 2854 - protein, 8 aa, Homo sapiens
SVPGHDNK

SEQ ID NO: 2855 - protein, 8 aa, Homo sapiens
SVPGHDNK

SEQ ID NO: 2856 - protein, 8 aa, Homo sapiens
DHQEPNPK

SEQ ID NO: 2857 - protein, 8 aa, Homo sapiens
DHQEPNPK

SEQ ID NO: 2858 - protein, 8 aa, Homo sapiens
DHQEPNPK

SEQ ID NO: 2859 - protein, 8 aa, Homo sapiens
DHQEPNPK

SEQ ID NO: 2860 - protein, 9 aa, Homo sapiens
NLLAFYVDR

SEQ ID NO: 2861 - protein, 9 aa, Homo sapiens
NLLAFYVDR

SEQ ID NO: 2862 - protein, 9 aa, Homo sapiens
NLLAFYVDR

SEQ ID NO: 2863 - protein, 9 aa, Homo sapiens
NLLAFYVDR

SEQ ID NO: 2864 - protein, 8 aa, Homo sapiens
QEATNATR

SEQ ID NO: 2865 - protein, 14 aa, Homo sapiens
SLGELDVFLAWINK

SEQ ID NO: 2866 - protein, 17 aa, Homo sapiens
VIHDNYDQLEVHAAAIK

SEQ ID NO: 2867 - protein, 17 aa, Homo sapiens
VIHDNYDQLEVHAAAIK

SEQ ID NO: 2868 - protein, 17 aa, Homo sapiens
VIHDNYDQLEVHAAAIK

SEQ ID NO: 2869 - protein, 17 aa, Homo sapiens
VIHDNYDQLEVHAAAIK

SEQ ID NO: 2870 - protein, 12 aa, Homo sapiens
EASLADNNTDVR

SEQ ID NO: 2871 - protein, 12 aa, Homo sapiens
EASLADNNTDVR

SEQ ID NO: 2872 - protein, 12 aa, Homo sapiens
EASLADNNTDVR

SEQ ID NO: 2873 - protein, 12 aa, Homo sapiens
EASLADNNTDVR

SEQ ID NO: 2874 - protein, 17 aa, Homo sapiens
QVLNFTLEEVLFPQSDR

SEQ ID NO: 2875 - protein, 11 aa, Homo sapiens
SNFQQPYITNR

SEQ ID NO: 2876 - protein, 11 aa, Homo sapiens
SNFQQPYITNR

SEQ ID NO: 2877 - protein, 11 aa, Homo sapiens
SNFQQPYITNR

SEQ ID NO: 2878 - protein, 11 aa, Homo sapiens
SNFQQPYITNR

SEQ ID NO: 2879 - protein, 7 aa, Homo sapiens
EELTPQK

SEQ ID NO: 2880 - protein, 7 aa, Homo sapiens
EELTPQK

SEQ ID NO: 2881 - protein, 7 aa, Homo sapiens
EELTPQK

SEQ ID NO: 2882 - protein, 7 aa, Homo sapiens
EELTPQK

SEQ ID NO: 2883 - protein, 24 aa, Homo sapiens
EGYLETVAAYYEEQHPELTPLLEK

SEQ ID NO: 2884 - protein, 13 aa, Homo sapiens
LQTWWHGVLAWVK

SEQ ID NO: 2885 - protein, 13 aa, Homo sapiens
LQTWWHGVLAWVK

SEQ ID NO: 2886 - protein, 13 aa, Homo sapiens
LQTWWHGVLAWVK

SEQ ID NO: 2887 - protein, 13 aa, Homo sapiens
LQTWWHGVLAWVK

SEQ ID NO: 2888 - protein, 13 aa, Homo sapiens
VVALVHAVQALWK

SEQ ID NO: 2889 - protein, 13 aa, Homo sapiens
VVALVHAVQALWK

SEQ ID NO: 2890 - protein, 13 aa, Homo sapiens
VVALVHAVQALWK

SEQ ID NO: 2891 - protein, 13 aa, Homo sapiens
VVALVHAVQALWK

SEQ ID NO: 2892 - protein, 6 aa, Homo sapiens
SLEENK

SEQ ID NO: 2893 - protein, 6 aa, Homo sapiens
SLEENK

SEQ ID NO: 2894 - protein, 6 aa, Homo sapiens
SLEENK

SEQ ID NO: 2895 - protein, 6 aa, Homo sapiens
SLEENK

SEQ ID NO: 2896 - protein, 6 aa, Homo sapiens
ENWVQR

SEQ ID NO: 2897 - protein, 6 aa, Homo sapiens
ENWVQR

SEQ ID NO: 2898 - protein, 6 aa, Homo sapiens
ENWVQR

SEQ ID NO: 2899 - protein, 6 aa, Homo sapiens
ENWVQR

SEQ ID NO: 2900 - protein, 9 aa, Homo sapiens
TYSKPFHPK

SEQ ID NO: 2901 - protein, 9 aa, Homo sapiens
TYSKPFHPK

SEQ ID NO: 2902 - protein, 9 aa, Homo sapiens
TYSKPFHPK

SEQ ID NO: 2903 - protein, 9 aa, Homo sapiens
TYSKPFHPK

SEQ ID NO: 2904 - protein, 9 aa, Homo sapiens
EATTNAPFR

SEQ ID NO: 2905 - protein, 9 aa, Homo sapiens
EATTNAPFR

SEQ ID NO: 2906 - protein, 9 aa, Homo sapiens
EATTNAPFR

SEQ ID NO: 2907 - protein, 9 aa, Homo sapiens
EATTNAPFR

SEQ ID NO: 2908 - protein, 13 aa, Homo sapiens
LEESYTLNSDLAR

SEQ ID NO: 2909 - protein, 13 aa, Homo sapiens
LEESYTLNSDLAR

SEQ ID NO: 2910 - protein, 13 aa, Homo sapiens
LEESYTLNSDLAR

SEQ ID NO: 2911 - protein, 13 aa, Homo sapiens
LEESYTLNSDLAR

SEQ ID NO: 2912 - protein, 21 aa, Homo sapiens
LHEWTKPENLDFIEVNVSLPR

SEQ ID NO: 2913 - protein, 13 aa, Homo sapiens
TFHFNTVEEVHSR

SEQ ID NO: 2914 - protein, 13 aa, Homo sapiens
TFHFNTVEEVHSR

SEQ ID NO: 2915 - protein, 13 aa, Homo sapiens
TFHFNTVEEVHSR

SEQ ID NO: 2916 - protein, 13 aa, Homo sapiens
TFHFNTVEEVHSR

SEQ ID NO: 2917 - protein, 14 aa, Homo sapiens
TYNFLPEFLVSTQK

SEQ ID NO: 2918 - protein, 14 aa, Homo sapiens
TYNFLPEFLVSTQK

SEQ ID NO: 2919 - protein, 14 aa, Homo sapiens
TYNFLPEFLVSTQK

SEQ ID NO: 2920 - protein, 14 aa, Homo sapiens
TYNFLPEFLVSTQK

SEQ ID NO: 2921 - protein, 15 aa, Homo sapiens
GDDTPLHLAASHGHR

SEQ ID NO: 2922 - protein, 15 aa, Homo sapiens
GDDTPLHLAASHGHR

SEQ ID NO: 2923 - protein, 15 aa, Homo sapiens
GDDTPLHLAASHGHR

SEQ ID NO: 2924 - protein, 15 aa, Homo sapiens
GDDTPLHLAASHGHR

SEQ ID NO: 2925 - protein, 7 aa, Homo sapiens
HSGIDFK

SEQ ID NO: 2926 - protein, 7 aa, Homo sapiens
HSGIDFK

SEQ ID NO: 2927 - protein, 7 aa, Homo sapiens
HSGIDFK

SEQ ID NO: 2928 - protein, 7 aa, Homo sapiens
HSGIDFK

SEQ ID NO: 2929 - protein, 11 aa, Homo sapiens
LNENHSGELWK

SEQ ID NO: 2930 - protein, 11 aa, Homo sapiens
LNENHSGELWK

SEQ ID NO: 2931 - protein, 11 aa, Homo sapiens
LNENHSGELWK

SEQ ID NO: 2932 - protein, 11 aa, Homo sapiens
LNENHSGELWK

SEQ ID NO: 2933 - protein, 7 aa, Homo sapiens
QLNFLTK

SEQ ID NO: 2934 - protein, 7 aa, Homo sapiens
QLNFLTK

SEQ ID NO: 2935 - protein, 7 aa, Homo sapiens
QLNFLTK

SEQ ID NO: 2936 - protein, 7 aa, Homo sapiens
QLNFLTK

SEQ ID NO: 2937 - protein, 9 aa, Homo sapiens
WQGNDIVVK

SEQ ID NO: 2938 - protein, 9 aa, Homo sapiens
WQGNDIVVK

SEQ ID NO: 2939 - protein, 9 aa, Homo sapiens
WQGNDIVVK

SEQ ID NO: 2940 - protein, 9 aa, Homo sapiens
WQGNDIVVK

SEQ ID NO: 2941 - protein, 8 aa, Homo sapiens
AEVWLFLK

SEQ ID NO: 2942 - protein, 8 aa, Homo sapiens
AEVWLFLK

SEQ ID NO: 2943 - protein, 8 aa, Homo sapiens
AEVWLFLK

SEQ ID NO: 2944 - protein, 8 aa, Homo sapiens
AEVWLFLK

SEQ ID NO: 2945 - protein, 10 aa, Homo sapiens
EGSDLSVVER

SEQ ID NO: 2946 - protein, 10 aa, Homo sapiens
EGSDLSVVER

SEQ ID NO: 2947 - protein, 10 aa, Homo sapiens
EGSDLSVVER

SEQ ID NO: 2948 - protein, 10 aa, Homo sapiens
EGSDLSVVER

SEQ ID NO: 2949 - protein, 9 aa, Homo sapiens
GHSPFANLK

SEQ ID NO: 2950 - protein, 9 aa, Homo sapiens
GHSPFANLK

SEQ ID NO: 2951 - protein, 9 aa, Homo sapiens
GHSPFANLK

SEQ ID NO: 2952 - protein, 9 aa, Homo sapiens
GHSPFANLK

SEQ ID NO: 2953 - protein, 18 aa, Homo sapiens
HPQGSLDTGEEAEEVGLK

SEQ ID NO: 2954 - protein, 18 aa, Homo sapiens
HPQGSLDTGEEAEEVGLK

SEQ ID NO: 2955 - protein, 18 aa, Homo sapiens
HPQGSLDTGEEAEEVGLK

SEQ ID NO: 2956 - protein, 18 aa, Homo sapiens
HPQGSLDTGEEAEEVGLK

SEQ ID NO: 2957 - protein, 8 aa, Homo sapiens
SELLLSEK

SEQ ID NO: 2958 - protein, 8 aa, Homo sapiens
SELLLSEK

SEQ ID NO: 2959 - protein, 8 aa, Homo sapiens
SELLLSEK

SEQ ID NO: 2960 - protein, 8 aa, Homo sapiens
SELLLSEK

SEQ ID NO: 2961 - protein, 13 aa, Homo sapiens
ALPGTPVASSQPR

SEQ ID NO: 2962 - protein, 13 aa, Homo sapiens
ALPGTPVASSQPR

SEQ ID NO: 2963 - protein, 13 aa, Homo sapiens
ALPGTPVASSQPR

SEQ ID NO: 2964 - protein, 13 aa, Homo sapiens
ALPGTPVASSQPR

SEQ ID NO: 2965 - protein, 16 aa, Homo sapiens
EVPLLQSLWLAHNEIR

SEQ ID NO: 2966 - protein, 16 aa, Homo sapiens
EVPLLQSLWLAHNEIR

SEQ ID NO: 2967 - protein, 16 aa, Homo sapiens
EVPLLQSLWLAHNEIR

SEQ ID NO: 2968 - protein, 16 aa, Homo sapiens
EVPLLQSLWLAHNEIR

SEQ ID NO: 2969 - protein, 10 aa, Homo sapiens
LPGLPEGAFR

SEQ ID NO: 2970 - protein, 10 aa, Homo sapiens
LPGLPEGAFR

SEQ ID NO: 2971 - protein, 10 aa, Homo sapiens
LPGLPEGAFR

SEQ ID NO: 2972 - protein, 10 aa, Homo sapiens
LPGLPEGAFR

SEQ ID NO: 2973 - protein, 27 aa, Homo sapiens
SLDLSHNLISDFAWSDLHNLSALQLLK

SEQ ID NO: 2974 - protein, 14 aa, Homo sapiens
TVAAGALASLSHLK

SEQ ID NO: 2975 - protein, 14 aa, Homo sapiens
TVAAGALASLSHLK

SEQ ID NO: 2976 - protein, 14 aa, Homo sapiens
TVAAGALASLSHLK

SEQ ID NO: 2977 - protein, 14 aa, Homo sapiens
TVAAGALASLSHLK

SEQ ID NO: 2978 - protein, 19 aa, Homo sapiens
DLDGNGYPDLIVGSFGVDK

SEQ ID NO: 2979 - protein, 19 aa, Homo sapiens
DLDGNGYPDLIVGSFGVDK

SEQ ID NO: 2980 - protein, 19 aa, Homo sapiens
DLDGNGYPDLIVGSFGVDK

SEQ ID NO: 2981 - protein, 19 aa, Homo sapiens
DLDGNGYPDLIVGSFGVDK

SEQ ID NO: 2982 - protein, 18 aa, Homo sapiens
LLESSLSSSEGEEPVEYK

SEQ ID NO: 2983 - protein, 18 aa, Homo sapiens
LLESSLSSSEGEEPVEYK

SEQ ID NO: 2984 - protein, 18 aa, Homo sapiens
LLESSLSSSEGEEPVEYK

SEQ ID NO: 2985 - protein, 18 aa, Homo sapiens
LLESSLSSSEGEEPVEYK

SEQ ID NO: 2986 - protein, 10 aa, Homo sapiens
SLQWFGATVR

SEQ ID NO: 2987 - protein, 10 aa, Homo sapiens
SLQWFGATVR

SEQ ID NO: 2988 - protein, 10 aa, Homo sapiens
SLQWFGATVR

SEQ ID NO: 2989 - protein, 10 aa, Homo sapiens
SLQWFGATVR

SEQ ID NO: 2990 - protein, 11 aa, Homo sapiens
SSASSGPQILK

SEQ ID NO: 2991 - protein, 11 aa, Homo sapiens
SSASSGPQILK

SEQ ID NO: 2992 - protein, 11 aa, Homo sapiens
SSASSGPQILK

SEQ ID NO: 2993 - protein, 11 aa, Homo sapiens
SSASSGPQILK

SEQ ID NO: 2994 - protein, 14 aa, Homo sapiens
VTAPPEAEYSGLVR

SEQ ID NO: 2995 - protein, 14 aa, Homo sapiens
VTAPPEAEYSGLVR

SEQ ID NO: 2996 - protein, 14 aa, Homo sapiens
VTAPPEAEYSGLVR

SEQ ID NO: 2997 - protein, 14 aa, Homo sapiens
VTAPPEAEYSGLVR

SEQ ID NO: 2998 - protein, 10 aa, Homo sapiens
LFTALFPFEK

SEQ ID NO: 2999 - protein, 10 aa, Homo sapiens
LFTALFPFEK

SEQ ID NO: 3000 - protein, 10 aa, Homo sapiens
LFTALFPFEK

SEQ ID NO: 3001 - protein, 10 aa, Homo sapiens
LFTALFPFEK

SEQ ID NO: 3002 - protein, 13 aa, Homo sapiens
SLPISLVFLVPVR

SEQ ID NO: 3003 - protein, 13 aa, Homo sapiens
SLPISLVFLVPVR

SEQ ID NO: 3004 - protein, 13 aa, Homo sapiens
SLPISLVFLVPVR

SEQ ID NO: 3005 - protein, 13 aa, Homo sapiens
SLPISLVFLVPVR

SEQ ID NO: 3006 - protein, 12 aa, Homo sapiens
SLVKPITQLLGR

SEQ ID NO: 3007 - protein, 12 aa, Homo sapiens
SLVKPITQLLGR

SEQ ID NO: 3008 - protein, 12 aa, Homo sapiens
SLVKPITQLLGR

SEQ ID NO: 3009 - protein, 12 aa, Homo sapiens
SLVKPITQLLGR

SEQ ID NO: 3010 - protein, 10 aa, Homo sapiens
VQSLVLGAPR

SEQ ID NO: 3011 - protein, 10 aa, Homo sapiens
VQSLVLGAPR

SEQ ID NO: 3012 - protein, 10 aa, Homo sapiens
VQSLVLGAPR

SEQ ID NO: 3013 - protein, 10 aa, Homo sapiens
VQSLVLGAPR

SEQ ID NO: 3014 - protein, 10 aa, Homo sapiens
YVIGVGDAFR

SEQ ID NO: 3015 - protein, 10 aa, Homo sapiens
YVIGVGDAFR

SEQ ID NO: 3016 - protein, 10 aa, Homo sapiens
YVIGVGDAFR

SEQ ID NO: 3017 - protein, 10 aa, Homo sapiens
YVIGVGDAFR

SEQ ID NO: 3018 - protein, 19 aa, Homo sapiens
ALVQTEDHLLLFLQQLAGK

SEQ ID NO: 3019 - protein, 19 aa, Homo sapiens
ALVQTEDHLLLFLQQLAGK

SEQ ID NO: 3020 - protein, 19 aa, Homo sapiens
ALVQTEDHLLLFLQQLAGK

SEQ ID NO: 3021 - protein, 19 aa, Homo sapiens
ALVQTEDHLLLFLQQLAGK

SEQ ID NO: 3022 - protein, 13 aa, Homo sapiens
FNVEDGEIVQQVR

SEQ ID NO: 3023 - protein, 13 aa, Homo sapiens
FNVEDGEIVQQVR

SEQ ID NO: 3024 - protein, 13 aa, Homo sapiens
FNVEDGEIVQQVR

SEQ ID NO: 3025 - protein, 13 aa, Homo sapiens
FNVEDGEIVQQVR

SEQ ID NO: 3026 - protein, 16 aa, Homo sapiens
HLLIGLPSGAILSLPK

SEQ ID NO: 3027 - protein, 16 aa, Homo sapiens
HLLIGLPSGAILSLPK

SEQ ID NO: 3028 - protein, 16 aa, Homo sapiens
HLLIGLPSGAILSLPK

SEQ ID NO: 3029 - protein, 16 aa, Homo sapiens
HLLIGLPSGAILSLPK

SEQ ID NO: 3030 - protein, 14 aa, Homo sapiens
LFGIESSSGTILWK

SEQ ID NO: 3031 - protein, 14 aa, Homo sapiens
LFGIESSSGTILWK

SEQ ID NO: 3032 - protein, 14 aa, Homo sapiens
LFGIESSSGTILWK

SEQ ID NO: 3033 - protein, 14 aa, Homo sapiens
LFGIESSSGTILWK

SEQ ID NO: 3034 - protein, 10 aa, Homo sapiens
VLLLIDDEYK

SEQ ID NO: 3035 - protein, 10 aa, Homo sapiens
VLLLIDDEYK

SEQ ID NO: 3036 - protein, 10 aa, Homo sapiens
VLLLIDDEYK

SEQ ID NO: 3037 - protein, 10 aa, Homo sapiens
VLLLIDDEYK

SEQ ID NO: 3038 - protein, 7 aa, Homo sapiens
DWSHYFK

SEQ ID NO: 3039 - protein, 7 aa, Homo sapiens
DWSHYFK

SEQ ID NO: 3040 - protein, 7 aa, Homo sapiens
DWSHYFK

SEQ ID NO: 3041 - protein, 7 aa, Homo sapiens
DWSHYFK

SEQ ID NO: 3042 - protein, 19 aa, Homo sapiens
GLQAQIASSGLTVEVDAPK

SEQ ID NO: 3043 - protein, 7 aa, Homo sapiens
LASYLDR

SEQ ID NO: 3044 - protein, 7 aa, Homo sapiens
LASYLDR

SEQ ID NO: 3045 - protein, 7 aa, Homo sapiens
LASYLDR

SEQ ID NO: 3046 - protein, 7 aa, Homo sapiens
LASYLDR

SEQ ID NO: 3047 - protein, 11 aa, Homo sapiens
LQLETEIEALK

SEQ ID NO: 3048 - protein, 11 aa, Homo sapiens
LQLETEIEALK

SEQ ID NO: 3049 - protein, 11 aa, Homo sapiens
LQLETEIEALK

SEQ ID NO: 3050 - protein, 11 aa, Homo sapiens
LQLETEIEALK

SEQ ID NO: 3051 - protein, 9 aa, Homo sapiens
VVSETNDTK

SEQ ID NO: 3052 - protein, 9 aa, Homo sapiens
VVSETNDTK

SEQ ID NO: 3053 - protein, 9 aa, Homo sapiens
VVSETNDTK

SEQ ID NO: 3054 - protein, 9 aa, Homo sapiens
VVSETNDTK

SEQ ID NO: 3055 - protein, 11 aa, Homo sapiens
APSIHGGSGGR

SEQ ID NO: 3056 - protein, 11 aa, Homo sapiens
APSIHGGSGGR

SEQ ID NO: 3057 - protein, 11 aa, Homo sapiens
APSIHGGSGGR

SEQ ID NO: 3058 - protein, 11 aa, Homo sapiens
APSIHGGSGGR

SEQ ID NO: 3059 - protein, 23 aa, Homo sapiens
FGAQLAHIQALISGIEAQLGDVR

SEQ ID NO: 3060 - protein, 23 aa, Homo sapiens
FGAQLAHIQALISGIEAQLGDVR

SEQ ID NO: 3061 - protein, 23 aa, Homo sapiens
FGAQLAHIQALISGIEAQLGDVR

SEQ ID NO: 3062 - protein, 23 aa, Homo sapiens
FGAQLAHIQALISGIEAQLGDVR

SEQ ID NO: 3063 - protein, 8 aa, Homo sapiens
FGPGVAFR

SEQ ID NO: 3064 - protein, 8 aa, Homo sapiens
FGPGVAFR

SEQ ID NO: 3065 - protein, 8 aa, Homo sapiens
FGPGVAFR

SEQ ID NO: 3066 - protein, 8 aa, Homo sapiens
FGPGVAFR

SEQ ID NO: 3067 - protein, 21 aa, Homo sapiens
GQVGGQVSVEVDSAPGTDLAK

SEQ ID NO: 3068 - protein, 21 aa, Homo sapiens
GQVGGQVSVEVDSAPGTDLAK

SEQ ID NO: 3069 - protein, 21 aa, Homo sapiens
GQVGGQVSVEVDSAPGTDLAK

SEQ ID NO: 3070 - protein, 21 aa, Homo sapiens
GQVGGQVSVEVDSAPGTDLAK

SEQ ID NO: 3071 - protein, 17 aa, Homo sapiens
SLLEGQEDHYNNLSASK

SEQ ID NO: 3072 - protein, 17 aa, Homo sapiens
SLLEGQEDHYNNLSASK

SEQ ID NO: 3073 - protein, 17 aa, Homo sapiens
SLLEGQEDHYNNLSASK

SEQ ID NO: 3074 - protein, 17 aa, Homo sapiens
SLLEGQEDHYNNLSASK

SEQ ID NO: 3075 - protein, 8 aa, Homo sapiens
ISSSSFSR

SEQ ID NO: 3076 - protein, 8 aa, Homo sapiens
ISSSSFSR

SEQ ID NO: 3077 - protein, 8 aa, Homo sapiens
ISSSSFSR

SEQ ID NO: 3078 - protein, 8 aa, Homo sapiens
ISSSSFSR

SEQ ID NO: 3079 - protein, 9 aa, Homo sapiens
LQAEIEGLK

SEQ ID NO: 3080 - protein, 9 aa, Homo sapiens
LQAEIEGLK

SEQ ID NO: 3081 - protein, 9 aa, Homo sapiens
LQAEIEGLK

SEQ ID NO: 3082 - protein, 9 aa, Homo sapiens
LQAEIEGLK

SEQ ID NO: 3083 - protein, 9 aa, Homo sapiens
SYTSGPGSR

SEQ ID NO: 3084 - protein, 9 aa, Homo sapiens
SYTSGPGSR

SEQ ID NO: 3085 - protein, 9 aa, Homo sapiens
SYTSGPGSR

SEQ ID NO: 3086 - protein, 9 aa, Homo sapiens
SYTSGPGSR

SEQ ID NO: 3087 - protein, 8 aa, Homo sapiens
WSLLQQQK

SEQ ID NO: 3088 - protein, 8 aa, Homo sapiens
WSLLQQQK

SEQ ID NO: 3089 - protein, 8 aa, Homo sapiens
WSLLQQQK

SEQ ID NO: 3090 - protein, 8 aa, Homo sapiens
WSLLQQQK

SEQ ID NO: 3091 - protein, 10 aa, Homo sapiens
YEELQSLAGK

SEQ ID NO: 3092 - protein, 10 aa, Homo sapiens
YEELQSLAGK

SEQ ID NO: 3093 - protein, 10 aa, Homo sapiens
YEELQSLAGK

SEQ ID NO: 3094 - protein, 10 aa, Homo sapiens
YEELQSLAGK

SEQ ID NO: 3095 - protein, 20 aa, Homo sapiens
INSVGSTASSSQPLLVHDDV

SEQ ID NO: 3096 - protein, 20 aa, Homo sapiens
INSVGSTASSSQPLLVHDDV

SEQ ID NO: 3097 - protein, 20 aa, Homo sapiens
INSVGSTASSSQPLLVHDDV

SEQ ID NO: 3098 - protein, 20 aa, Homo sapiens
INSVGSTASSSQPLLVHDDV

SEQ ID NO: 3099 - protein, 13 aa, Homo sapiens
LVVQSSIDSSAFK

SEQ ID NO: 3100 - protein, 13 aa, Homo sapiens
LVVQSSIDSSAFK

SEQ ID NO: 3101 - protein, 13 aa, Homo sapiens
LVVQSSIDSSAFK

SEQ ID NO: 3102 - protein, 13 aa, Homo sapiens
LVVQSSIDSSAFK

SEQ ID NO: 3103 - protein, 10 aa, Homo sapiens
QATLTISSAR

SEQ ID NO: 3104 - protein, 10 aa, Homo sapiens
QATLTISSAR

SEQ ID NO: 3105 - protein, 10 aa, Homo sapiens
QATLTISSAR

SEQ ID NO: 3106 - protein, 10 aa, Homo sapiens
QATLTISSAR

SEQ ID NO: 3107 - protein, 10 aa, Homo sapiens
TSAYFNFAFK

SEQ ID NO: 3108 - protein, 10 aa, Homo sapiens
TSAYFNFAFK

SEQ ID NO: 3109 - protein, 10 aa, Homo sapiens
TSAYFNFAFK

SEQ ID NO: 3110 - protein, 10 aa, Homo sapiens
TSAYFNFAFK

SEQ ID NO: 3111 - protein, 9 aa, Homo sapiens
YVSELHLTR

SEQ ID NO: 3112 - protein, 9 aa, Homo sapiens
YVSELHLTR

SEQ ID NO: 3113 - protein, 9 aa, Homo sapiens
YVSELHLTR

SEQ ID NO: 3114 - protein, 9 aa, Homo sapiens
YVSELHLTR

SEQ ID NO: 3115 - protein, 10 aa, Homo sapiens
EVEVIGGADK

SEQ ID NO: 3116 - protein, 10 aa, Homo sapiens
EVEVIGGADK

SEQ ID NO: 3117 - protein, 10 aa, Homo sapiens
EVEVIGGADK

SEQ ID NO: 3118 - protein, 10 aa, Homo sapiens
EVEVIGGADK

SEQ ID NO: 3119 - protein, 18 aa, Homo sapiens
KPFGAILNLVPLAESVVK

SEQ ID NO: 3120 - protein, 18 aa, Homo sapiens
KPFGAILNLVPLAESVVK

SEQ ID NO: 3121 - protein, 18 aa, Homo sapiens
KPFGAILNLVPLAESVVK

SEQ ID NO: 3122 - protein, 18 aa, Homo sapiens
KPFGAILNLVPLAESVVK

SEQ ID NO: 3123 - protein, 19 aa, Homo sapiens
ILQLILLALATGLVGGETR

SEQ ID NO: 3124 - protein, 6 aa, Homo sapiens
LPHTLR

SEQ ID NO: 3125 - protein, 6 aa, Homo sapiens
LPHTLR

SEQ ID NO: 3126 - protein, 6 aa, Homo sapiens
LPHTLR

SEQ ID NO: 3127 - protein, 18 aa, Homo sapiens
TATESFPHPGFNNSLPNK

SEQ ID NO: 3128 - protein, 18 aa, Homo sapiens
TATESFPHPGFNNSLPNK

SEQ ID NO: 3129 - protein, 18 aa, Homo sapiens
TATESFPHPGFNNSLPNK

SEQ ID NO: 3130 - protein, 18 aa, Homo sapiens
TATESFPHPGFNNSLPNK

SEQ ID NO: 3131 - protein, 12 aa, Homo sapiens
YIVHLGQHNLQK

SEQ ID NO: 3132 - protein, 12 aa, Homo sapiens
YIVHLGQHNLQK

SEQ ID NO: 3133 - protein, 12 aa, Homo sapiens
YIVHLGQHNLQK

SEQ ID NO: 3134 - protein, 12 aa, Homo sapiens
YIVHLGQHNLQK

SEQ ID NO: 3135 - protein, 8 aa, Homo sapiens
VEAGEQVR

SEQ ID NO: 3136 - protein, 8 aa, Homo sapiens
VEAGEQVR

SEQ ID NO: 3137 - protein, 8 aa, Homo sapiens
VEAGEQVR

SEQ ID NO: 3138 - protein, 8 aa, Homo sapiens
VEAGEQVR

SEQ ID NO: 3139 - protein, 16 aa, Homo sapiens
VSGWGTTTSPQVNYPK

SEQ ID NO: 3140 - protein, 16 aa, Homo sapiens
VSGWGTTTSPQVNYPK

SEQ ID NO: 3141 - protein, 16 aa, Homo sapiens
VSGWGTTTSPQVNYPK

SEQ ID NO: 3142 - protein, 16 aa, Homo sapiens
VSGWGTTTSPQVNYPK

SEQ ID NO: 3143 - protein, 6 aa, Homo sapiens
YVLWIR

SEQ ID NO: 3144 - protein, 6 aa, Homo sapiens
YVLWIR

SEQ ID NO: 3145 - protein, 6 aa, Homo sapiens
YVLWIR

SEQ ID NO: 3146 - protein, 6 aa, Homo sapiens
YVLWIR

SEQ ID NO: 3147 - protein, 10 aa, Homo sapiens
QVTHPNYNSR

SEQ ID NO: 3148 - protein, 10 aa, Homo sapiens
QVTHPNYNSR

SEQ ID NO: 3149 - protein, 10 aa, Homo sapiens
QVTHPNYNSR

SEQ ID NO: 3150 - protein, 10 aa, Homo sapiens
QVTHPNYNSR

SEQ ID NO: 3151 - protein, 12 aa, Homo sapiens
VLGSGTWPSAPK

SEQ ID NO: 3152 - protein, 12 aa, Homo sapiens
VLGSGTWPSAPK

SEQ ID NO: 3153 - protein, 12 aa, Homo sapiens
VLGSGTWPSAPK

SEQ ID NO: 3154 - protein, 12 aa, Homo sapiens
VLGSGTWPSAPK

SEQ ID NO: 3155 - protein, 13 aa, Homo sapiens
VSGWGTISSPIAR

SEQ ID NO: 3156 - protein, 13 aa, Homo sapiens
VSGWGTISSPIAR

SEQ ID NO: 3157 - protein, 13 aa, Homo sapiens
VSGWGTISSPIAR

SEQ ID NO: 3158 - protein, 13 aa, Homo sapiens
VSGWGTISSPIAR

SEQ ID NO: 3159 - protein, 11 aa, Homo sapiens
ESSQEQSSVVR

SEQ ID NO: 3160 - protein, 11 aa, Homo sapiens
ESSQEQSSVVR

SEQ ID NO: 3161 - protein, 11 aa, Homo sapiens
ESSQEQSSVVR

SEQ ID NO: 3162 - protein, 11 aa, Homo sapiens
ESSQEQSSVVR

SEQ ID NO: 3163 - protein, 12 aa, Homo sapiens
LSELIQPLPLER

SEQ ID NO: 3164 - protein, 12 aa, Homo sapiens
LSELIQPLPLER

SEQ ID NO: 3165 - protein, 12 aa, Homo sapiens
LSELIQPLPLER

SEQ ID NO: 3166 - protein, 12 aa, Homo sapiens
LSELIQPLPLER

SEQ ID NO: 3167 - protein, 7 aa, Homo sapiens
YTNWIQK

SEQ ID NO: 3168 - protein, 7 aa, Homo sapiens
YTNWIQK

SEQ ID NO: 3169 - protein, 7 aa, Homo sapiens
YTNWIQK

SEQ ID NO: 3170 - protein, 7 aa, Homo sapiens
YTNWIQK

SEQ ID NO: 3171 - protein, 8 aa, Homo sapiens
DFVQPPTK

SEQ ID NO: 3172 - protein, 8 aa, Homo sapiens
DFVQPPTK

SEQ ID NO: 3173 - protein, 8 aa, Homo sapiens
DFVQPPTK

SEQ ID NO: 3174 - protein, 8 aa, Homo sapiens
DFVQPPTK

SEQ ID NO: 3175 - protein, 19 aa, Homo sapiens
DIPTNSPELEETLTHTITK

SEQ ID NO: 3176 - protein, 19 aa, Homo sapiens
DIPTNSPELEETLTHTITK

SEQ ID NO: 3177 - protein, 19 aa, Homo sapiens
DIPTNSPELEETLTHTITK

SEQ ID NO: 3178 - protein, 19 aa, Homo sapiens
DIPTNSPELEETLTHTITK

SEQ ID NO: 3179 - protein, 19 aa, Homo sapiens
GHGLGHGHEQQHGLGHGHK

SEQ ID NO: 3180 - protein, 18 aa, Homo sapiens
LDDDLEHQGGHVLDHGHK

SEQ ID NO: 3181 - protein, 18 aa, Homo sapiens
LDDDLEHQGGHVLDHGHK

SEQ ID NO: 3182 - protein, 18 aa, Homo sapiens
LDDDLEHQGGHVLDHGHK

SEQ ID NO: 3183 - protein, 18 aa, Homo sapiens
LDDDLEHQGGHVLDHGHK

SEQ ID NO: 3184 - protein, 11 aa, Homo sapiens
TVGSDTFYSFK

SEQ ID NO: 3185 - protein, 11 aa, Homo sapiens
TVGSDTFYSFK

SEQ ID NO: 3186 - protein, 11 aa, Homo sapiens
TVGSDTFYSFK

SEQ ID NO: 3187 - protein, 11 aa, Homo sapiens
TVGSDTFYSFK

SEQ ID NO: 3188 - protein, 8 aa, Homo sapiens
APIIAVTR

SEQ ID NO: 3189 - protein, 8 aa, Homo sapiens
APIIAVTR

SEQ ID NO: 3190 - protein, 8 aa, Homo sapiens
APIIAVTR

SEQ ID NO: 3191 - protein, 8 aa, Homo sapiens
APIIAVTR

SEQ ID NO: 3192 - protein, 14 aa, Homo sapiens
DPVQEAWAEDVDLR

SEQ ID NO: 3193 - protein, 14 aa, Homo sapiens
DPVQEAWAEDVDLR

SEQ ID NO: 3194 - protein, 14 aa, Homo sapiens
DPVQEAWAEDVDLR

SEQ ID NO: 3195 - protein, 14 aa, Homo sapiens
DPVQEAWAEDVDLR

SEQ ID NO: 3196 - protein, 9 aa, Homo sapiens
GDYPLEAVR

SEQ ID NO: 3197 - protein, 13 aa, Homo sapiens
IYVDDGLISLQVK

SEQ ID NO: 3198 - protein, 13 aa, Homo sapiens
IYVDDGLISLQVK

SEQ ID NO: 3199 - protein, 13 aa, Homo sapiens
IYVDDGLISLQVK

SEQ ID NO: 3200 - protein, 13 aa, Homo sapiens
IYVDDGLISLQVK

SEQ ID NO: 3201 - protein, 11 aa, Homo sapiens
LDIDSPPITAR

SEQ ID NO: 3202 - protein, 11 aa, Homo sapiens
LDIDSPPITAR

SEQ ID NO: 3203 - protein, 11 aa, Homo sapiens
LDIDSPPITAR

SEQ ID NO: 3204 - protein, 11 aa, Homo sapiens
LDIDSPPITAR

SEQ ID NO: 3205 - protein, 13 aa, Homo sapiens
DALESTLAETEAR

SEQ ID NO: 3206 - protein, 13 aa, Homo sapiens
DALESTLAETEAR

SEQ ID NO: 3207 - protein, 13 aa, Homo sapiens
DALESTLAETEAR

SEQ ID NO: 3208 - protein, 13 aa, Homo sapiens
DALESTLAETEAR

SEQ ID NO: 3209 - protein, 15 aa, Homo sapiens
LNVEVDAAPPVDLNR

SEQ ID NO: 3210 - protein, 15 aa, Homo sapiens
LNVEVDAAPPVDLNR

SEQ ID NO: 3211 - protein, 15 aa, Homo sapiens
LNVEVDAAPPVDLNR

SEQ ID NO: 3212 - protein, 15 aa, Homo sapiens
LNVEVDAAPPVDLNR

SEQ ID NO: 3213 - protein, 9 aa, Homo sapiens
LPSLSPVAR

SEQ ID NO: 3214 - protein, 9 aa, Homo sapiens
LPSLSPVAR

SEQ ID NO: 3215 - protein, 9 aa, Homo sapiens
LPSLSPVAR

SEQ ID NO: 3216 - protein, 9 aa, Homo sapiens
LPSLSPVAR

SEQ ID NO: 3217 - protein, 9 aa, Homo sapiens
LVVEIDNAK

SEQ ID NO: 3218 - protein, 9 aa, Homo sapiens
LVVEIDNAK

SEQ ID NO: 3219 - protein, 9 aa, Homo sapiens
LVVEIDNAK

SEQ ID NO: 3220 - protein, 9 aa, Homo sapiens
LVVEIDNAK

SEQ ID NO: 3221 - protein, 8 aa, Homo sapiens
YETEVSLR

SEQ ID NO: 3222 - protein, 8 aa, Homo sapiens
YETEVSLR

SEQ ID NO: 3223 - protein, 8 aa, Homo sapiens
YETEVSLR

SEQ ID NO: 3224 - protein, 8 aa, Homo sapiens
YETEVSLR

SEQ ID NO: 3225 - protein, 12 aa, Homo sapiens
DTEQTLYQVQER

SEQ ID NO: 3226 - protein, 12 aa, Homo sapiens
DTEQTLYQVQER

SEQ ID NO: 3227 - protein, 12 aa, Homo sapiens
DTEQTLYQVQER

SEQ ID NO: 3228 - protein, 12 aa, Homo sapiens
DTEQTLYQVQER

SEQ ID NO: 3229 - protein, 10 aa, Homo sapiens
IQGTLQPHAR

SEQ ID NO: 3230 - protein, 10 aa, Homo sapiens
IQGTLQPHAR

SEQ ID NO: 3231 - protein, 10 aa, Homo sapiens
IQGTLQPHAR

SEQ ID NO: 3232 - protein, 10 aa, Homo sapiens
IQGTLQPHAR

SEQ ID NO: 3233 - protein, 11 aa, Homo sapiens
SLADVDAILAR

SEQ ID NO: 3234 - protein, 11 aa, Homo sapiens
SLADVDAILAR

SEQ ID NO: 3235 - protein, 11 aa, Homo sapiens
SLADVDAILAR

SEQ ID NO: 3236 - protein, 11 aa, Homo sapiens
SLADVDAILAR

SEQ ID NO: 3237 - protein, 26 aa, Homo sapiens
TGGSAQPETPYSGPGLLIDSLVLLPR

SEQ ID NO: 3238 - protein, 23 aa, Homo sapiens
VLELSIPASAEQIQHLAGAIAER

SEQ ID NO: 3239 - protein, 23 aa, Homo sapiens
VLELSIPASAEQIQHLAGAIAER

SEQ ID NO: 3240 - protein, 23 aa, Homo sapiens
VLELSIPASAEQIQHLAGAIAER

SEQ ID NO: 3241 - protein, 23 aa, Homo sapiens
VLELSIPASAEQIQHLAGAIAER

SEQ ID NO: 3242 - protein, 9 aa, Homo sapiens
DQLIYNLLK

SEQ ID NO: 3243 - protein, 9 aa, Homo sapiens
DQLIYNLLK

SEQ ID NO: 3244 - protein, 9 aa, Homo sapiens
DQLIYNLLK

SEQ ID NO: 3245 - protein, 9 aa, Homo sapiens
DQLIYNLLK

SEQ ID NO: 3246 - protein, 8 aa, Homo sapiens
FIIPNVVK

SEQ ID NO: 3247 - protein, 8 aa, Homo sapiens
FIIPNVVK

SEQ ID NO: 3248 - protein, 8 aa, Homo sapiens
FIIPNVVK

SEQ ID NO: 3249 - protein, 8 aa, Homo sapiens
FIIPNVVK

SEQ ID NO: 3250 - protein, 17 aa, Homo sapiens
LLIVSNPVDILTYVAWK

SEQ ID NO: 3251 - protein, 9 aa, Homo sapiens
LVIITAGAR

SEQ ID NO: 3252 - protein, 9 aa, Homo sapiens
LVIITAGAR

SEQ ID NO: 3253 - protein, 9 aa, Homo sapiens
LVIITAGAR

SEQ ID NO: 3254 - protein, 9 aa, Homo sapiens
LVIITAGAR

SEQ ID NO: 3255 - protein, 10 aa, Homo sapiens
TLHPDLGTDK

SEQ ID NO: 3256 - protein, 10 aa, Homo sapiens
TLHPDLGTDK

SEQ ID NO: 3257 - protein, 10 aa, Homo sapiens
TLHPDLGTDK

SEQ ID NO: 3258 - protein, 10 aa, Homo sapiens
TLHPDLGTDK

SEQ ID NO: 3259 - protein, 9 aa, Homo sapiens
DYSVTANSK

SEQ ID NO: 3260 - protein, 9 aa, Homo sapiens
DYSVTANSK

SEQ ID NO: 3261 - protein, 9 aa, Homo sapiens
DYSVTANSK

SEQ ID NO: 3262 - protein, 9 aa, Homo sapiens
DYSVTANSK

SEQ ID NO: 3263 - protein, 8 aa, Homo sapiens
FIIPQIVK

SEQ ID NO: 3264 - protein, 8 aa, Homo sapiens
FIIPQIVK

SEQ ID NO: 3265 - protein, 8 aa, Homo sapiens
FIIPQIVK

SEQ ID NO: 3266 - protein, 8 aa, Homo sapiens
FIIPQIVK

SEQ ID NO: 3267 - protein, 9 aa, Homo sapiens
GLTSVINQK

SEQ ID NO: 3268 - protein, 9 aa, Homo sapiens
GLTSVINQK

SEQ ID NO: 3269 - protein, 9 aa, Homo sapiens
GLTSVINQK

SEQ ID NO: 3270 - protein, 9 aa, Homo sapiens
GLTSVINQK

SEQ ID NO: 3271 - protein, 16 aa, Homo sapiens
LIAPVAEEEATVPNNK

SEQ ID NO: 3272 - protein, 16 aa, Homo sapiens
LIAPVAEEEATVPNNK

SEQ ID NO: 3273 - protein, 16 aa, Homo sapiens
LIAPVAEEEATVPNNK

SEQ ID NO: 3274 - protein, 16 aa, Homo sapiens
LIAPVAEEEATVPNNK

SEQ ID NO: 3275 - protein, 6 aa, Homo sapiens
NVNVFK

SEQ ID NO: 3276 - protein, 6 aa, Homo sapiens
NVNVFK

SEQ ID NO: 3277 - protein, 6 aa, Homo sapiens
NVNVFK

SEQ ID NO: 3278 - protein, 6 aa, Homo sapiens
NVNVFK

SEQ ID NO: 3279 - protein, 10 aa, Homo sapiens
DGGAWGTEQR

SEQ ID NO: 3280 - protein, 10 aa, Homo sapiens
DGGAWGTEQR

SEQ ID NO: 3281 - protein, 10 aa, Homo sapiens
DGGAWGTEQR

SEQ ID NO: 3282 - protein, 10 aa, Homo sapiens
DGGAWGTEQR

SEQ ID NO: 3283 - protein, 8 aa, Homo sapiens
GEVAPDAK

SEQ ID NO: 3284 - protein, 8 aa, Homo sapiens
GEVAPDAK

SEQ ID NO: 3285 - protein, 8 aa, Homo sapiens
GEVAPDAK

SEQ ID NO: 3286 - protein, 8 aa, Homo sapiens
GEVAPDAK

SEQ ID NO: 3287 - protein, 8 aa, Homo sapiens
LPDGYEFK

SEQ ID NO: 3288 - protein, 8 aa, Homo sapiens
LPDGYEFK

SEQ ID NO: 3289 - protein, 8 aa, Homo sapiens
LPDGYEFK

SEQ ID NO: 3290 - protein, 8 aa, Homo sapiens
LPDGYEFK

SEQ ID NO: 3291 - protein, 8 aa, Homo sapiens
SFVLNLGK

SEQ ID NO: 3292 - protein, 8 aa, Homo sapiens
SFVLNLGK

SEQ ID NO: 3293 - protein, 8 aa, Homo sapiens
SFVLNLGK

SEQ ID NO: 3294 - protein, 8 aa, Homo sapiens
SFVLNLGK

SEQ ID NO: 3295 - protein, 11 aa, Homo sapiens
GNDVAFHFNPR

SEQ ID NO: 3296 - protein, 11 aa, Homo sapiens
GNDVAFHFNPR

SEQ ID NO: 3297 - protein, 11 aa, Homo sapiens
GNDVAFHFNPR

SEQ ID NO: 3298 - protein, 11 aa, Homo sapiens
GNDVAFHFNPR

SEQ ID NO: 3299 - protein, 7 aa, Homo sapiens
IALDFQR

SEQ ID NO: 3300 - protein, 7 aa, Homo sapiens
IALDFQR

SEQ ID NO: 3301 - protein, 7 aa, Homo sapiens
IALDFQR

SEQ ID NO: 3302 - protein, 7 aa, Homo sapiens
IALDFQR

SEQ ID NO: 3303 - protein, 11 aa, Homo sapiens
IQVLVEPDHFK

SEQ ID NO: 3304 - protein, 11 aa, Homo sapiens
IQVLVEPDHFK

SEQ ID NO: 3305 - protein, 11 aa, Homo sapiens
IQVLVEPDHFK

SEQ ID NO: 3306 - protein, 11 aa, Homo sapiens
IQVLVEPDHFK

SEQ ID NO: 3307 - protein, 7 aa, Homo sapiens
LDNNWGR

SEQ ID NO: 3308 - protein, 7 aa, Homo sapiens
LDNNWGR

SEQ ID NO: 3309 - protein, 7 aa, Homo sapiens
LDNNWGR

SEQ ID NO: 3310 - protein, 7 aa, Homo sapiens
LDNNWGR

SEQ ID NO: 3311 - protein, 14 aa, Homo sapiens
VAVNDAHLLQYNHR

SEQ ID NO: 3312 - protein, 21 aa, Homo sapiens
FAVNFQTGFSGNDIAFHFNPR

SEQ ID NO: 3313 - protein, 8 aa, Homo sapiens
FDENAVVR

SEQ ID NO: 3314 - protein, 8 aa, Homo sapiens
FDENAVVR

SEQ ID NO: 3315 - protein, 8 aa, Homo sapiens
FDENAVVR

SEQ ID NO: 3316 - protein, 8 aa, Homo sapiens
FDENAVVR

SEQ ID NO: 3317 - protein, 13 aa, Homo sapiens
NTQIDNSWGSEER

SEQ ID NO: 3318 - protein, 13 aa, Homo sapiens
NTQIDNSWGSEER

SEQ ID NO: 3319 - protein, 13 aa, Homo sapiens
NTQIDNSWGSEER

SEQ ID NO: 3320 - protein, 13 aa, Homo sapiens
NTQIDNSWGSEER

SEQ ID NO: 3321 - protein, 14 aa, Homo sapiens
SILLSGTVLPSAQR

SEQ ID NO: 3322 - protein, 14 aa, Homo sapiens
SILLSGTVLPSAQR

SEQ ID NO: 3323 - protein, 14 aa, Homo sapiens
SILLSGTVLPSAQR

SEQ ID NO: 3324 - protein, 14 aa, Homo sapiens
SILLSGTVLPSAQR

SEQ ID NO: 3325 - protein, 14 aa, Homo sapiens
VAVDGQHLFEYYHR

SEQ ID NO: 3326 - protein, 14 aa, Homo sapiens
VAVDGQHLFEYYHR

SEQ ID NO: 3327 - protein, 14 aa, Homo sapiens
VAVDGQHLFEYYHR

SEQ ID NO: 3328 - protein, 14 aa, Homo sapiens
VAVDGQHLFEYYHR

SEQ ID NO: 3329 - protein, 12 aa, Homo sapiens
ASHEEVEGLVEK

SEQ ID NO: 3330 - protein, 12 aa, Homo sapiens
ASHEEVEGLVEK

SEQ ID NO: 3331 - protein, 12 aa, Homo sapiens
ASHEEVEGLVEK

SEQ ID NO: 3332 - protein, 12 aa, Homo sapiens
ASHEEVEGLVEK

SEQ ID NO: 3333 - protein, 10 aa, Homo sapiens
AVDTWSWGER

SEQ ID NO: 3334 - protein, 9 aa, Homo sapiens
STHTLDLSR

SEQ ID NO: 3335 - protein, 9 aa, Homo sapiens
STHTLDLSR

SEQ ID NO: 3336 - protein, 9 aa, Homo sapiens
STHTLDLSR

SEQ ID NO: 3337 - protein, 9 aa, Homo sapiens
STHTLDLSR

SEQ ID NO: 3338 - protein, 6 aa, Homo sapiens
VEIFYR

SEQ ID NO: 3339 - protein, 6 aa, Homo sapiens
VEIFYR

SEQ ID NO: 3340 - protein, 6 aa, Homo sapiens
VEIFYR

SEQ ID NO: 3341 - protein, 6 aa, Homo sapiens
VEIFYR

SEQ ID NO: 3342 - protein, 13 aa, Homo sapiens
YSSDYFQAPSDYR

SEQ ID NO: 3343 - protein, 13 aa, Homo sapiens
YSSDYFQAPSDYR

SEQ ID NO: 3344 - protein, 13 aa, Homo sapiens
YSSDYFQAPSDYR

SEQ ID NO: 3345 - protein, 13 aa, Homo sapiens
YSSDYFQAPSDYR

SEQ ID NO: 3346 - protein, 9 aa, Homo sapiens
AQLAPSATK

SEQ ID NO: 3347 - protein, 9 aa, Homo sapiens
AQLAPSATK

SEQ ID NO: 3348 - protein, 9 aa, Homo sapiens
AQLAPSATK

SEQ ID NO: 3349 - protein, 9 aa, Homo sapiens
AQLAPSATK

SEQ ID NO: 3350 - protein, 16 aa, Homo sapiens
LEEWLSHVVGAVYAPK

SEQ ID NO: 3351 - protein, 16 aa, Homo sapiens
LEEWLSHVVGAVYAPK

SEQ ID NO: 3352 - protein, 16 aa, Homo sapiens
LEEWLSHVVGAVYAPK

SEQ ID NO: 3353 - protein, 16 aa, Homo sapiens
LEEWLSHVVGAVYAPK

SEQ ID NO: 3354 - protein, 13 aa, Homo sapiens
LNVALDVGIPLPK

SEQ ID NO: 3355 - protein, 13 aa, Homo sapiens
LNVALDVGIPLPK

SEQ ID NO: 3356 - protein, 13 aa, Homo sapiens
LNVALDVGIPLPK

SEQ ID NO: 3357 - protein, 13 aa, Homo sapiens
LNVALDVGIPLPK

SEQ ID NO: 3358 - protein, 11 aa, Homo sapiens
SVAGDIIDFPK

SEQ ID NO: 3359 - protein, 11 aa, Homo sapiens
SVAGDIIDFPK

SEQ ID NO: 3360 - protein, 11 aa, Homo sapiens
SVAGDIIDFPK

SEQ ID NO: 3361 - protein, 11 aa, Homo sapiens
SVAGDIIDFPK

SEQ ID NO: 3362 - protein, 24 aa, Homo sapiens
VLNINFSNSVLEIVENAVVLTVAS

SEQ ID NO: 3363 - protein, 13 aa, Homo sapiens
GLLPNLVDNLVNR

SEQ ID NO: 3364 - protein, 13 aa, Homo sapiens
GLLPNLVDNLVNR

SEQ ID NO: 3365 - protein, 13 aa, Homo sapiens
GLLPNLVDNLVNR

SEQ ID NO: 3366 - protein, 13 aa, Homo sapiens
GLLPNLVDNLVNR

SEQ ID NO: 3367 - protein, 22 aa, Homo sapiens
ILNIDFSNADIDVLEDLLVLSA

SEQ ID NO: 3368 - protein, 8 aa, Homo sapiens
IVELTLPR

SEQ ID NO: 3369 - protein, 8 aa, Homo sapiens
IVELTLPR

SEQ ID NO: 3370 - protein, 8 aa, Homo sapiens
IVELTLPR

SEQ ID NO: 3371 - protein, 8 aa, Homo sapiens
IVELTLPR

SEQ ID NO: 3372 - protein, 14 aa, Homo sapiens
LLPGVGVYLSLYTR

SEQ ID NO: 3373 - protein, 14 aa, Homo sapiens
LLPGVGVYLSLYTR

SEQ ID NO: 3374 - protein, 14 aa, Homo sapiens
LLPGVGVYLSLYTR

SEQ ID NO: 3375 - protein, 14 aa, Homo sapiens
LLPGVGVYLSLYTR

SEQ ID NO: 3376 - protein, 12 aa, Homo sapiens
YGEILESEGSIR

SEQ ID NO: 3377 - protein, 12 aa, Homo sapiens
YGEILESEGSIR

SEQ ID NO: 3378 - protein, 12 aa, Homo sapiens
YGEILESEGSIR

SEQ ID NO: 3379 - protein, 12 aa, Homo sapiens
YGEILESEGSIR

SEQ ID NO: 3380 - protein, 21 aa, Homo sapiens
DAGIEPGPDTYLALLNAYAEK

SEQ ID NO: 3381 - protein, 21 aa, Homo sapiens
DAGIEPGPDTYLALLNAYAEK

SEQ ID NO: 3382 - protein, 21 aa, Homo sapiens
DAGIEPGPDTYLALLNAYAEK

SEQ ID NO: 3383 - protein, 21 aa, Homo sapiens
DAGIEPGPDTYLALLNAYAEK

SEQ ID NO: 3384 - protein, 10 aa, Homo sapiens
NVQGIIEILK

SEQ ID NO: 3385 - protein, 10 aa, Homo sapiens
NVQGIIEILK

SEQ ID NO: 3386 - protein, 10 aa, Homo sapiens
NVQGIIEILK

SEQ ID NO: 3387 - protein, 10 aa, Homo sapiens
NVQGIIEILK

SEQ ID NO: 3388 - protein, 14 aa, Homo sapiens
SGGLGGSHALLLLR

SEQ ID NO: 3389 - protein, 14 aa, Homo sapiens
SGGLGGSHALLLLR

SEQ ID NO: 3390 - protein, 14 aa, Homo sapiens
SGGLGGSHALLLLR

SEQ ID NO: 3391 - protein, 14 aa, Homo sapiens
SGGLGGSHALLLLR

SEQ ID NO: 3392 - protein, 11 aa, Homo sapiens
TVLDQQQTPSR

SEQ ID NO: 3393 - protein, 11 aa, Homo sapiens
TVLDQQQTPSR

SEQ ID NO: 3394 - protein, 11 aa, Homo sapiens
TVLDQQQTPSR

SEQ ID NO: 3395 - protein, 11 aa, Homo sapiens
TVLDQQQTPSR

SEQ ID NO: 3396 - protein, 17 aa, Homo sapiens
TVQLTSSELESTLETLK

SEQ ID NO: 3397 - protein, 17 aa, Homo sapiens
TVQLTSSELESTLETLK

SEQ ID NO: 3398 - protein, 17 aa, Homo sapiens
TVQLTSSELESTLETLK

SEQ ID NO: 3399 - protein, 17 aa, Homo sapiens
TVQLTSSELESTLETLK

SEQ ID NO: 3400 - protein, 14 aa, Homo sapiens
AALSGANVLTLIEK

SEQ ID NO: 3401 - protein, 14 aa, Homo sapiens
AALSGANVLTLIEK

SEQ ID NO: 3402 - protein, 14 aa, Homo sapiens
AALSGANVLTLIEK

SEQ ID NO: 3403 - protein, 14 aa, Homo sapiens
AALSGANVLTLIEK

SEQ ID NO: 3404 - protein, 16 aa, Homo sapiens
TVLWPNGLSLDIPAGR

SEQ ID NO: 3405 - protein, 16 aa, Homo sapiens
TVLWPNGLSLDIPAGR

SEQ ID NO: 3406 - protein, 16 aa, Homo sapiens
TVLWPNGLSLDIPAGR

SEQ ID NO: 3407 - protein, 16 aa, Homo sapiens
TVLWPNGLSLDIPAGR

SEQ ID NO: 3408 - protein, 11 aa, Homo sapiens
VFFTDYGQIPK

SEQ ID NO: 3409 - protein, 11 aa, Homo sapiens
VFFTDYGQIPK

SEQ ID NO: 3410 - protein, 11 aa, Homo sapiens
VFFTDYGQIPK

SEQ ID NO: 3411 - protein, 11 aa, Homo sapiens
VFFTDYGQIPK

SEQ ID NO: 3412 - protein, 18 aa, Homo sapiens
LPSGLPVSLLTLYLDNNK

SEQ ID NO: 3413 - protein, 21 aa, Homo sapiens
NIPTVNENLENYYLEVNQLEK

SEQ ID NO: 3414 - protein, 21 aa, Homo sapiens
NIPTVNENLENYYLEVNQLEK

SEQ ID NO: 3415 - protein, 21 aa, Homo sapiens
NIPTVNENLENYYLEVNQLEK

SEQ ID NO: 3416 - protein, 21 aa, Homo sapiens
NIPTVNENLENYYLEVNQLEK

SEQ ID NO: 3417 - protein, 10 aa, Homo sapiens
NNQIDHIDEK

SEQ ID NO: 3418 - protein, 10 aa, Homo sapiens
NNQIDHIDEK

SEQ ID NO: 3419 - protein, 10 aa, Homo sapiens
NNQIDHIDEK

SEQ ID NO: 3420 - protein, 10 aa, Homo sapiens
NNQIDHIDEK

SEQ ID NO: 3421 - protein, 11 aa, Homo sapiens
SLEDLQLTHNK

SEQ ID NO: 3422 - protein, 11 aa, Homo sapiens
SLEDLQLTHNK

SEQ ID NO: 3423 - protein, 11 aa, Homo sapiens
SLEDLQLTHNK

SEQ ID NO: 3424 - protein, 11 aa, Homo sapiens
SLEDLQLTHNK

SEQ ID NO: 3425 - protein, 14 aa, Homo sapiens
SLEYLDLSFNQIAR

SEQ ID NO: 3426 - protein, 14 aa, Homo sapiens
SLEYLDLSFNQIAR

SEQ ID NO: 3427 - protein, 14 aa, Homo sapiens
SLEYLDLSFNQIAR

SEQ ID NO: 3428 - protein, 14 aa, Homo sapiens
SLEYLDLSFNQIAR

SEQ ID NO: 3429 - protein, 7 aa, Homo sapiens
DPEDSQR

SEQ ID NO: 3430 - protein, 7 aa, Homo sapiens
DPEDSQR

SEQ ID NO: 3431 - protein, 7 aa, Homo sapiens
DPEDSQR

SEQ ID NO: 3432 - protein, 7 aa, Homo sapiens
DPEDSQR

SEQ ID NO: 3433 - protein, 7 aa, Homo sapiens
TDEGDNR

SEQ ID NO: 3434 - protein, 7 aa, Homo sapiens
TDEGDNR

SEQ ID NO: 3435 - protein, 7 aa, Homo sapiens
TDEGDNR

SEQ ID NO: 3436 - protein, 7 aa, Homo sapiens
TDEGDNR

SEQ ID NO: 3437 - protein, 10 aa, Homo sapiens
VWTDANLTAR

SEQ ID NO: 3438 - protein, 10 aa, Homo sapiens
VWTDANLTAR

SEQ ID NO: 3439 - protein, 10 aa, Homo sapiens
VWTDANLTAR

SEQ ID NO: 3440 - protein, 10 aa, Homo sapiens
VWTDANLTAR

SEQ ID NO: 3441 - protein, 10 aa, Homo sapiens
NWAPGEPNNR

SEQ ID NO: 3442 - protein, 10 aa, Homo sapiens
NWAPGEPNNR

SEQ ID NO: 3443 - protein, 10 aa, Homo sapiens
NWAPGEPNNR

SEQ ID NO: 3444 - protein, 10 aa, Homo sapiens
NWAPGEPNNR

SEQ ID NO: 3445 - protein, 8 aa, Homo sapiens
QPQNGSVR

SEQ ID NO: 3446 - protein, 8 aa, Homo sapiens
QPQNGSVR

SEQ ID NO: 3447 - protein, 8 aa, Homo sapiens
QPQNGSVR

SEQ ID NO: 3448 - protein, 8 aa, Homo sapiens
QPQNGSVR

SEQ ID NO: 3449 - protein, 10 aa, Homo sapiens
YTHLVAIQNK

SEQ ID NO: 3450 - protein, 10 aa, Homo sapiens
YTHLVAIQNK

SEQ ID NO: 3451 - protein, 10 aa, Homo sapiens
YTHLVAIQNK

SEQ ID NO: 3452 - protein, 10 aa, Homo sapiens
YTHLVAIQNK

SEQ ID NO: 3453 - protein, 12 aa, Homo sapiens
EVAAWTYHYSTK

SEQ ID NO: 3454 - protein, 12 aa, Homo sapiens
EVAAWTYHYSTK

SEQ ID NO: 3455 - protein, 12 aa, Homo sapiens
EVAAWTYHYSTK

SEQ ID NO: 3456 - protein, 12 aa, Homo sapiens
EVAAWTYHYSTK

SEQ ID NO: 3457 - protein, 8 aa, Homo sapiens
NEIDYLNK

SEQ ID NO: 3458 - protein, 8 aa, Homo sapiens
NEIDYLNK

SEQ ID NO: 3459 - protein, 8 aa, Homo sapiens
NEIDYLNK

SEQ ID NO: 3460 - protein, 8 aa, Homo sapiens
NEIDYLNK

SEQ ID NO: 3461 - protein, 10 aa, Homo sapiens
YTDLVAIQNK

SEQ ID NO: 3462 - protein, 10 aa, Homo sapiens
YTDLVAIQNK

SEQ ID NO: 3463 - protein, 10 aa, Homo sapiens
YTDLVAIQNK

SEQ ID NO: 3464 - protein, 10 aa, Homo sapiens
YTDLVAIQNK

SEQ ID NO: 3465 - protein, 11 aa, Homo sapiens
HWFQAGYSTSR

SEQ ID NO: 3466 - protein, 11 aa, Homo sapiens
HWFQAGYSTSR

SEQ ID NO: 3467 - protein, 11 aa, Homo sapiens
HWFQAGYSTSR

SEQ ID NO: 3468 - protein, 11 aa, Homo sapiens
HWFQAGYSTSR

SEQ ID NO: 3469 - protein, 13 aa, Homo sapiens
NQGTSDFLPSRPR

SEQ ID NO: 3470 - protein, 13 aa, Homo sapiens
NQGTSDFLPSRPR

SEQ ID NO: 3471 - protein, 13 aa, Homo sapiens
NQGTSDFLPSRPR

SEQ ID NO: 3472 - protein, 13 aa, Homo sapiens
NQGTSDFLPSRPR

SEQ ID NO: 3473 - protein, 7 aa, Homo sapiens
TPILLIR

SEQ ID NO: 3474 - protein, 7 aa, Homo sapiens
TPILLIR

SEQ ID NO: 3475 - protein, 7 aa, Homo sapiens
TPILLIR

SEQ ID NO: 3476 - protein, 7 aa, Homo sapiens
TPILLIR

SEQ ID NO: 3477 - protein, 20 aa, Homo sapiens
VSVNPSYLVPESDYTNNVVR

SEQ ID NO: 3478 - protein, 20 aa, Homo sapiens
VSVNPSYLVPESDYTNNVVR

SEQ ID NO: 3479 - protein, 20 aa, Homo sapiens
VSVNPSYLVPESDYTNNVVR

SEQ ID NO: 3480 - protein, 20 aa, Homo sapiens
VSVNPSYLVPESDYTNNVVR

SEQ ID NO: 3481 - protein, 32 aa, Homo sapiens
YRPGYGTGYFQYGLPDLVADPYYIQASTYVQK

SEQ ID NO: 3482 - protein, 9 aa, Homo sapiens
GGPQQPHNK

SEQ ID NO: 3483 - protein, 9 aa, Homo sapiens
GGPQQPHNK

SEQ ID NO: 3484 - protein, 9 aa, Homo sapiens
GGPQQPHNK

SEQ ID NO: 3485 - protein, 9 aa, Homo sapiens
GGPQQPHNK

SEQ ID NO: 3486 - protein, 6 aa, Homo sapiens
LNLTSR

SEQ ID NO: 3487 - protein, 6 aa, Homo sapiens
LNLTSR

SEQ ID NO: 3488 - protein, 6 aa, Homo sapiens
LNLTSR

SEQ ID NO: 3489 - protein, 6 aa, Homo sapiens
LNLTSR

SEQ ID NO: 3490 - protein, 11 aa, Homo sapiens
LTGGAAGHQDR

SEQ ID NO: 3491 - protein, 11 aa, Homo sapiens
LTGGAAGHQDR

SEQ ID NO: 3492 - protein, 11 aa, Homo sapiens
LTGGAAGHQDR

SEQ ID NO: 3493 - protein, 11 aa, Homo sapiens
LTGGAAGHQDR

SEQ ID NO: 3494 - protein, 9 aa, Homo sapiens
SNSGQYPAK

SEQ ID NO: 3495 - protein, 9 aa, Homo sapiens
SNSGQYPAK

SEQ ID NO: 3496 - protein, 9 aa, Homo sapiens
SNSGQYPAK

SEQ ID NO: 3497 - protein, 9 aa, Homo sapiens
SNSGQYPAK

SEQ ID NO: 3498 - protein, 6 aa, Homo sapiens
TYFSPR

SEQ ID NO: 3499 - protein, 6 aa, Homo sapiens
TYFSPR

SEQ ID NO: 3500 - protein, 6 aa, Homo sapiens
TYFSPR

SEQ ID NO: 3501 - protein, 6 aa, Homo sapiens
TYFSPR

SEQ ID NO: 3502 - protein, 11 aa, Homo sapiens
EAALLEEEEGV

SEQ ID NO: 3503 - protein, 11 aa, Homo sapiens
EAALLEEEEGV

SEQ ID NO: 3504 - protein, 11 aa, Homo sapiens
EAALLEEEEGV

SEQ ID NO: 3505 - protein, 11 aa, Homo sapiens
EAALLEEEEGV

SEQ ID NO: 3506 - protein, 7 aa, Homo sapiens
IAYPSLR

SEQ ID NO: 3507 - protein, 7 aa, Homo sapiens
IAYPSLR

SEQ ID NO: 3508 - protein, 7 aa, Homo sapiens
IAYPSLR

SEQ ID NO: 3509 - protein, 7 aa, Homo sapiens
IAYPSLR

SEQ ID NO: 3510 - protein, 25 aa, Homo sapiens
QPNEGSSSQEEEGPSTSPDAESLFR

SEQ ID NO: 3511 - protein, 7 aa, Homo sapiens
VLEHVVR

SEQ ID NO: 3512 - protein, 8 aa, Homo sapiens
YEFLWGPR

SEQ ID NO: 3513 - protein, 8 aa, Homo sapiens
YEFLWGPR

SEQ ID NO: 3514 - protein, 8 aa, Homo sapiens
YEFLWGPR

SEQ ID NO: 3515 - protein, 8 aa, Homo sapiens
YEFLWGPR

SEQ ID NO: 3516 - protein, 25 aa, Homo sapiens
APEPISTQSHSVLILFHSDNSGENR

SEQ ID NO: 3517 - protein, 15 aa, Homo sapiens
APGELEHGLITFSTR

SEQ ID NO: 3518 - protein, 15 aa, Homo sapiens
APGELEHGLITFSTR

SEQ ID NO: 3519 - protein, 15 aa, Homo sapiens
APGELEHGLITFSTR

SEQ ID NO: 3520 - protein, 15 aa, Homo sapiens
APGELEHGLITFSTR

SEQ ID NO: 3521 - protein, 11 aa, Homo sapiens
DSDLLSPSDFK

SEQ ID NO: 3522 - protein, 11 aa, Homo sapiens
DSDLLSPSDFK

SEQ ID NO: 3523 - protein, 11 aa, Homo sapiens
DSDLLSPSDFK

SEQ ID NO: 3524 - protein, 11 aa, Homo sapiens
DSDLLSPSDFK

SEQ ID NO: 3525 - protein, 11 aa, Homo sapiens
SDENEQHLGVK

SEQ ID NO: 3526 - protein, 11 aa, Homo sapiens
SDENEQHLGVK

SEQ ID NO: 3527 - protein, 11 aa, Homo sapiens
SDENEQHLGVK

SEQ ID NO: 3528 - protein, 11 aa, Homo sapiens
SDENEQHLGVK

SEQ ID NO: 3529 - protein, 15 aa, Homo sapiens
TGVITSPDFPNPYPK

SEQ ID NO: 3530 - protein, 15 aa, Homo sapiens
TGVITSPDFPNPYPK

SEQ ID NO: 3531 - protein, 15 aa, Homo sapiens
TGVITSPDFPNPYPK

SEQ ID NO: 3532 - protein, 15 aa, Homo sapiens
TGVITSPDFPNPYPK

SEQ ID NO: 3533 - protein, 10 aa, Homo sapiens
ESAFEFLSSA

SEQ ID NO: 3534 - protein, 10 aa, Homo sapiens
GEFVTTVQQR

SEQ ID NO: 3535 - protein, 10 aa, Homo sapiens
GEFVTTVQQR

SEQ ID NO: 3536 - protein, 10 aa, Homo sapiens
GEFVTTVQQR

SEQ ID NO: 3537 - protein, 10 aa, Homo sapiens
GEFVTTVQQR

SEQ ID NO: 3538 - protein, 9 aa, Homo sapiens
LGVTANDVK

SEQ ID NO: 3539 - protein, 9 aa, Homo sapiens
LGVTANDVK

SEQ ID NO: 3540 - protein, 9 aa, Homo sapiens
LGVTANDVK

SEQ ID NO: 3541 - protein, 9 aa, Homo sapiens
LGVTANDVK

SEQ ID NO: 3542 - protein, 20 aa, Homo sapiens
NVIIWGNHSSTQYPDVNHAK

SEQ ID NO: 3543 - protein, 26 aa, Homo sapiens
VLVTGAAGQIAYSLLYSIGNGSVFGK

SEQ ID NO: 3544 - protein, 26 aa, Homo sapiens
VLVTGAAGQIAYSLLYSIGNGSVFGK

SEQ ID NO: 3545 - protein, 26 aa, Homo sapiens
VLVTGAAGQIAYSLLYSIGNGSVFGK

SEQ ID NO: 3546 - protein, 26 aa, Homo sapiens
VLVTGAAGQIAYSLLYSIGNGSVFGK

SEQ ID NO: 3547 - protein, 22 aa, Homo sapiens
LTLYDIAHTPGVAADLSHIETK

SEQ ID NO: 3548 - protein, 19 aa, Homo sapiens
VAVLGASGGIGQPLSLLLK

SEQ ID NO: 3549 - protein, 19 aa, Homo sapiens
VAVLGASGGIGQPLSLLLK

SEQ ID NO: 3550 - protein, 19 aa, Homo sapiens
VAVLGASGGIGQPLSLLLK

SEQ ID NO: 3551 - protein, 19 aa, Homo sapiens
VAVLGASGGIGQPLSLLLK

SEQ ID NO: 3552 - protein, 14 aa, Homo sapiens
VDFPQDQLTALTGR

SEQ ID NO: 3553 - protein, 14 aa, Homo sapiens
VDFPQDQLTALTGR

SEQ ID NO: 3554 - protein, 14 aa, Homo sapiens
VDFPQDQLTALTGR

SEQ ID NO: 3555 - protein, 14 aa, Homo sapiens
VDFPQDQLTALTGR

SEQ ID NO: 3556 - protein, 12 aa, Homo sapiens
VNVPVIGGHAGK

SEQ ID NO: 3557 - protein, 12 aa, Homo sapiens
VNVPVIGGHAGK

SEQ ID NO: 3558 - protein, 12 aa, Homo sapiens
VNVPVIGGHAGK

SEQ ID NO: 3559 - protein, 12 aa, Homo sapiens
VNVPVIGGHAGK

SEQ ID NO: 3560 - protein, 7 aa, Homo sapiens
VSSFEEK

SEQ ID NO: 3561 - protein, 7 aa, Homo sapiens
VSSFEEK

SEQ ID NO: 3562 - protein, 7 aa, Homo sapiens
VSSFEEK

SEQ ID NO: 3563 - protein, 7 aa, Homo sapiens
VSSFEEK

SEQ ID NO: 3564 - protein, 7 aa, Homo sapiens
IGGAQNR

SEQ ID NO: 3565 - protein, 7 aa, Homo sapiens
IGGAQNR

SEQ ID NO: 3566 - protein, 7 aa, Homo sapiens
IGGAQNR

SEQ ID NO: 3567 - protein, 7 aa, Homo sapiens
IGGAQNR

SEQ ID NO: 3568 - protein, 14 aa, Homo sapiens
HEVHFLHEESILER

SEQ ID NO: 3569 - protein, 14 aa, Homo sapiens
HEVHFLHEESILER

SEQ ID NO: 3570 - protein, 14 aa, Homo sapiens
HEVHFLHEESILER

SEQ ID NO: 3571 - protein, 14 aa, Homo sapiens
HEVHFLHEESILER

SEQ ID NO: 3572 - protein, 19 aa, Homo sapiens
HFTEDGNILQLANLPDLYK

SEQ ID NO: 3573 - protein, 19 aa, Homo sapiens
HFTEDGNILQLANLPDLYK

SEQ ID NO: 3574 - protein, 19 aa, Homo sapiens
HFTEDGNILQLANLPDLYK

SEQ ID NO: 3575 - protein, 19 aa, Homo sapiens
HFTEDGNILQLANLPDLYK

SEQ ID NO: 3576 - protein, 16 aa, Homo sapiens
LQSFEDLASISTYGFR

SEQ ID NO: 3577 - protein, 16 aa, Homo sapiens
LQSFEDLASISTYGFR

SEQ ID NO: 3578 - protein, 16 aa, Homo sapiens
LQSFEDLASISTYGFR

SEQ ID NO: 3579 - protein, 16 aa, Homo sapiens
LQSFEDLASISTYGFR

SEQ ID NO: 3580 - protein, 12 aa, Homo sapiens
TLPNASTVDNIR

SEQ ID NO: 3581 - protein, 12 aa, Homo sapiens
TLPNASTVDNIR

SEQ ID NO: 3582 - protein, 12 aa, Homo sapiens
TLPNASTVDNIR

SEQ ID NO: 3583 - protein, 12 aa, Homo sapiens
TLPNASTVDNIR

SEQ ID NO: 3584 - protein, 9 aa, Homo sapiens
WTVEHIVYK

SEQ ID NO: 3585 - protein, 9 aa, Homo sapiens
WTVEHIVYK

SEQ ID NO: 3586 - protein, 9 aa, Homo sapiens
WTVEHIVYK

SEQ ID NO: 3587 - protein, 9 aa, Homo sapiens
WTVEHIVYK

SEQ ID NO: 3588 - protein, 11 aa, Homo sapiens
DGFFYFFHGTR

SEQ ID NO: 3589 - protein, 11 aa, Homo sapiens
DGFFYFFHGTR

SEQ ID NO: 3590 - protein, 11 aa, Homo sapiens
DGFFYFFHGTR

SEQ ID NO: 3591 - protein, 11 aa, Homo sapiens
DGFFYFFHGTR

SEQ ID NO: 3592 - protein, 10 aa, Homo sapiens
DIYSSFGFPR

SEQ ID NO: 3593 - protein, 10 aa, Homo sapiens
DIYSSFGFPR

SEQ ID NO: 3594 - protein, 10 aa, Homo sapiens
DIYSSFGFPR

SEQ ID NO: 3595 - protein, 10 aa, Homo sapiens
DIYSSFGFPR

SEQ ID NO: 3596 - protein, 10 aa, Homo sapiens
IENYTPDLPR

SEQ ID NO: 3597 - protein, 10 aa, Homo sapiens
IENYTPDLPR

SEQ ID NO: 3598 - protein, 10 aa, Homo sapiens
IENYTPDLPR

SEQ ID NO: 3599 - protein, 10 aa, Homo sapiens
IENYTPDLPR

SEQ ID NO: 3600 - protein, 10 aa, Homo sapiens
LTFDAITTIR

SEQ ID NO: 3601 - protein, 10 aa, Homo sapiens
LTFDAITTIR

SEQ ID NO: 3602 - protein, 10 aa, Homo sapiens
LTFDAITTIR

SEQ ID NO: 3603 - protein, 10 aa, Homo sapiens
LTFDAITTIR

SEQ ID NO: 3604 - protein, 14 aa, Homo sapiens
SQNPVQPIGPQTPK

SEQ ID NO: 3605 - protein, 14 aa, Homo sapiens
SQNPVQPIGPQTPK

SEQ ID NO: 3606 - protein, 14 aa, Homo sapiens
SQNPVQPIGPQTPK

SEQ ID NO: 3607 - protein, 14 aa, Homo sapiens
SQNPVQPIGPQTPK

SEQ ID NO: 3608 - protein, 13 aa, Homo sapiens
FPVHAALVWGPEK

SEQ ID NO: 3609 - protein, 13 aa, Homo sapiens
FPVHAALVWGPEK

SEQ ID NO: 3610 - protein, 13 aa, Homo sapiens
FPVHAALVWGPEK

SEQ ID NO: 3611 - protein, 13 aa, Homo sapiens
FPVHAALVWGPEK

SEQ ID NO: 3612 - protein, 11 aa, Homo sapiens
FPWQLVQEQVR

SEQ ID NO: 3613 - protein, 11 aa, Homo sapiens
FPWQLVQEQVR

SEQ ID NO: 3614 - protein, 11 aa, Homo sapiens
FPWQLVQEQVR

SEQ ID NO: 3615 - protein, 11 aa, Homo sapiens
FPWQLVQEQVR

SEQ ID NO: 3616 - protein, 14 aa, Homo sapiens
GGQLQPGYPALASR

SEQ ID NO: 3617 - protein, 21 aa, Homo sapiens
GVPSEIDAAFQDADGYAYFLR

SEQ ID NO: 3618 - protein, 21 aa, Homo sapiens
GVPSEIDAAFQDADGYAYFLR

SEQ ID NO: 3619 - protein, 21 aa, Homo sapiens
GVPSEIDAAFQDADGYAYFLR

SEQ ID NO: 3620 - protein, 21 aa, Homo sapiens
GVPSEIDAAFQDADGYAYFLR

SEQ ID NO: 3621 - protein, 17 aa, Homo sapiens
VWSDVTPLTFTEVHEGR

SEQ ID NO: 3622 - protein, 17 aa, Homo sapiens
VWSDVTPLTFTEVHEGR

SEQ ID NO: 3623 - protein, 17 aa, Homo sapiens
VWSDVTPLTFTEVHEGR

SEQ ID NO: 3624 - protein, 17 aa, Homo sapiens
VWSDVTPLTFTEVHEGR

SEQ ID NO: 3625 - protein, 25 aa, Homo sapiens
FLLILLLQATASGALPLNSSTSLEK

SEQ ID NO: 3626 - protein, 25 aa, Homo sapiens
FLLILLLQATASGALPLNSSTSLEK

SEQ ID NO: 3627 - protein, 25 aa, Homo sapiens
FLLILLLQATASGALPLNSSTSLEK

SEQ ID NO: 3628 - protein, 25 aa, Homo sapiens
FLLILLLQATASGALPLNSSTSLEK

SEQ ID NO: 3629 - protein, 10 aa, Homo sapiens
GIQSLYGDPK

SEQ ID NO: 3630 - protein, 10 aa, Homo sapiens
GIQSLYGDPK

SEQ ID NO: 3631 - protein, 10 aa, Homo sapiens
GIQSLYGDPK

SEQ ID NO: 3632 - protein, 10 aa, Homo sapiens
GIQSLYGDPK

SEQ ID NO: 3633 - protein, 8 aa, Homo sapiens
IDAVFYSK

SEQ ID NO: 3634 - protein, 8 aa, Homo sapiens
IDAVFYSK

SEQ ID NO: 3635 - protein, 8 aa, Homo sapiens
IDAVFYSK

SEQ ID NO: 3636 - protein, 8 aa, Homo sapiens
IDAVFYSK

SEQ ID NO: 3637 - protein, 26 aa, Homo sapiens
TSVNLISSLWPTLPSGIEAAYEIEAR

SEQ ID NO: 3638 - protein, 19 aa, Homo sapiens
YYYFFQGSNQFEYDFLLQR

SEQ ID NO: 3639 - protein, 8 aa, Homo sapiens
AVDSEYPK

SEQ ID NO: 3640 - protein, 8 aa, Homo sapiens
AVDSEYPK

SEQ ID NO: 3641 - protein, 8 aa, Homo sapiens
AVDSEYPK

SEQ ID NO: 3642 - protein, 8 aa, Homo sapiens
AVDSEYPK

SEQ ID NO: 3643 - protein, 6 aa, Homo sapiens
FNEELR

SEQ ID NO: 3644 - protein, 6 aa, Homo sapiens
FNEELR

SEQ ID NO: 3645 - protein, 6 aa, Homo sapiens
FNEELR

SEQ ID NO: 3646 - protein, 6 aa, Homo sapiens
FNEELR

SEQ ID NO: 3647 - protein, 9 aa, Homo sapiens
FYGLQVTGK

SEQ ID NO: 3648 - protein, 9 aa, Homo sapiens
FYGLQVTGK

SEQ ID NO: 3649 - protein, 9 aa, Homo sapiens
FYGLQVTGK

SEQ ID NO: 3650 - protein, 9 aa, Homo sapiens
FYGLQVTGK

SEQ ID NO: 3651 - protein, 15 aa, Homo sapiens
HWVFDEASLEPGYPK

SEQ ID NO: 3652 - protein, 15 aa, Homo sapiens
HWVFDEASLEPGYPK

SEQ ID NO: 3653 - protein, 15 aa, Homo sapiens
HWVFDEASLEPGYPK

SEQ ID NO: 3654 - protein, 15 aa, Homo sapiens
HWVFDEASLEPGYPK

SEQ ID NO: 3655 - protein, 9 aa, Homo sapiens
VWESATPLR

SEQ ID NO: 3656 - protein, 9 aa, Homo sapiens
VWESATPLR

SEQ ID NO: 3657 - protein, 9 aa, Homo sapiens
VWESATPLR

SEQ ID NO: 3658 - protein, 9 aa, Homo sapiens
VWESATPLR

SEQ ID NO: 3659 - protein, 12 aa, Homo sapiens
AFQVWSDVTPLR

SEQ ID NO: 3660 - protein, 12 aa, Homo sapiens
AFQVWSDVTPLR

SEQ ID NO: 3661 - protein, 12 aa, Homo sapiens
AFQVWSDVTPLR

SEQ ID NO: 3662 - protein, 12 aa, Homo sapiens
AFQVWSDVTPLR

SEQ ID NO: 3663 - protein, 12 aa, Homo sapiens
IDAVYEAPQEEK

SEQ ID NO: 3664 - protein, 12 aa, Homo sapiens
IDAVYEAPQEEK

SEQ ID NO: 3665 - protein, 12 aa, Homo sapiens
IDAVYEAPQEEK

SEQ ID NO: 3666 - protein, 12 aa, Homo sapiens
IDAVYEAPQEEK

SEQ ID NO: 3667 - protein, 19 aa, Homo sapiens
IIGYTPDLDPETVDDAFAR

SEQ ID NO: 3668 - protein, 19 aa, Homo sapiens
IIGYTPDLDPETVDDAFAR

SEQ ID NO: 3669 - protein, 19 aa, Homo sapiens
IIGYTPDLDPETVDDAFAR

SEQ ID NO: 3670 - protein, 19 aa, Homo sapiens
IIGYTPDLDPETVDDAFAR

SEQ ID NO: 3671 - protein, 29 aa, Homo sapiens
LIADAWNAIPDNLDAVVDLQGGGHSYFFK

SEQ ID NO: 3672 - protein, 12 aa, Homo sapiens
QDIVFDGIAQIR

SEQ ID NO: 3673 - protein, 12 aa, Homo sapiens
QDIVFDGIAQIR

SEQ ID NO: 3674 - protein, 12 aa, Homo sapiens
QDIVFDGIAQIR

SEQ ID NO: 3675 - protein, 12 aa, Homo sapiens
QDIVFDGIAQIR

SEQ ID NO: 3676 - protein, 29 aa, Homo sapiens
DSIYNAVSIWSNVTPLIFQQVQNGDADIK

SEQ ID NO: 3677 - protein, 6 aa, Homo sapiens
HTLTYR

SEQ ID NO: 3678 - protein, 8 aa, Homo sapiens
IQHLYGEK

SEQ ID NO: 3679 - protein, 8 aa, Homo sapiens
IQHLYGEK

SEQ ID NO: 3680 - protein, 8 aa, Homo sapiens
IQHLYGEK

SEQ ID NO: 3681 - protein, 8 aa, Homo sapiens
IQHLYGEK

SEQ ID NO: 3682 - protein, 11 aa, Homo sapiens
TFQLSADDIQR

SEQ ID NO: 3683 - protein, 11 aa, Homo sapiens
TFQLSADDIQR

SEQ ID NO: 3684 - protein, 11 aa, Homo sapiens
TFQLSADDIQR

SEQ ID NO: 3685 - protein, 11 aa, Homo sapiens
TFQLSADDIQR

SEQ ID NO: 3686 - protein, 9 aa, Homo sapiens
DLPHITVDR

SEQ ID NO: 3687 - protein, 9 aa, Homo sapiens
DLPHITVDR

SEQ ID NO: 3688 - protein, 9 aa, Homo sapiens
DLPHITVDR

SEQ ID NO: 3689 - protein, 9 aa, Homo sapiens
DLPHITVDR

SEQ ID NO: 3690 - protein, 6 aa, Homo sapiens
IVSYTR

SEQ ID NO: 3691 - protein, 6 aa, Homo sapiens
IVSYTR

SEQ ID NO: 3692 - protein, 6 aa, Homo sapiens
IVSYTR

SEQ ID NO: 3693 - protein, 6 aa, Homo sapiens
IVSYTR

SEQ ID NO: 3694 - protein, 7 aa, Homo sapiens
LSQDDIK

SEQ ID NO: 3695 - protein, 7 aa, Homo sapiens
LSQDDIK

SEQ ID NO: 3696 - protein, 7 aa, Homo sapiens
LSQDDIK

SEQ ID NO: 3697 - protein, 7 aa, Homo sapiens
LSQDDIK

SEQ ID NO: 3698 - protein, 8 aa, Homo sapiens
NANSLEAK

SEQ ID NO: 3699 - protein, 8 aa, Homo sapiens
NANSLEAK

SEQ ID NO: 3700 - protein, 8 aa, Homo sapiens
NANSLEAK

SEQ ID NO: 3701 - protein, 8 aa, Homo sapiens
NANSLEAK

SEQ ID NO: 3702 - protein, 15 aa, Homo sapiens
AFALWSAVTPLTFTR

SEQ ID NO: 3703 - protein, 15 aa, Homo sapiens
AFALWSAVTPLTFTR

SEQ ID NO: 3704 - protein, 15 aa, Homo sapiens
AFALWSAVTPLTFTR

SEQ ID NO: 3705 - protein, 15 aa, Homo sapiens
AFALWSAVTPLTFTR

SEQ ID NO: 3706 - protein, 9 aa, Homo sapiens
AVIDDAFAR

SEQ ID NO: 3707 - protein, 9 aa, Homo sapiens
FQTFEGDLK

SEQ ID NO: 3708 - protein, 9 aa, Homo sapiens
FQTFEGDLK

SEQ ID NO: 3709 - protein, 9 aa, Homo sapiens
FQTFEGDLK

SEQ ID NO: 3710 - protein, 9 aa, Homo sapiens
FQTFEGDLK

SEQ ID NO: 3711 - protein, 15 aa, Homo sapiens
LGLGADVAQVTGALR

SEQ ID NO: 3712 - protein, 15 aa, Homo sapiens
LGLGADVAQVTGALR

SEQ ID NO: 3713 - protein, 15 aa, Homo sapiens
LGLGADVAQVTGALR

SEQ ID NO: 3714 - protein, 15 aa, Homo sapiens
LGLGADVAQVTGALR

SEQ ID NO: 3715 - protein, 11 aa, Homo sapiens
SLGPALLLLQK

SEQ ID NO: 3716 - protein, 11 aa, Homo sapiens
SLGPALLLLQK

SEQ ID NO: 3717 - protein, 11 aa, Homo sapiens
SLGPALLLLQK

SEQ ID NO: 3718 - protein, 11 aa, Homo sapiens
SLGPALLLLQK

SEQ ID NO: 3719 - protein, 9 aa, Homo sapiens
EQILGDEAR

SEQ ID NO: 3720 - protein, 12 aa, Homo sapiens
SLAASSSFYGQR

SEQ ID NO: 3721 - protein, 12 aa, Homo sapiens
SLAASSSFYGQR

SEQ ID NO: 3722 - protein, 12 aa, Homo sapiens
SLAASSSFYGQR

SEQ ID NO: 3723 - protein, 12 aa, Homo sapiens
SLAASSSFYGQR

SEQ ID NO: 3724 - protein, 11 aa, Homo sapiens
TLPSGLDDYPR

SEQ ID NO: 3725 - protein, 11 aa, Homo sapiens
TLPSGLDDYPR

SEQ ID NO: 3726 - protein, 11 aa, Homo sapiens
TLPSGLDDYPR

SEQ ID NO: 3727 - protein, 11 aa, Homo sapiens
TLPSGLDDYPR

SEQ ID NO: 3728 - protein, 18 aa, Homo sapiens
VDPALFPPVPLFTAVPSR

SEQ ID NO: 3729 - protein, 9 aa, Homo sapiens
VPPEFLVQR

SEQ ID NO: 3730 - protein, 13 aa, Homo sapiens
FLHQDIDSGQGIR

SEQ ID NO: 3731 - protein, 13 aa, Homo sapiens
FLHQDIDSGQGIR

SEQ ID NO: 3732 - protein, 13 aa, Homo sapiens
FLHQDIDSGQGIR

SEQ ID NO: 3733 - protein, 13 aa, Homo sapiens
FLHQDIDSGQGIR

SEQ ID NO: 3734 - protein, 11 aa, Homo sapiens
GHQAFDVGQPR

SEQ ID NO: 3735 - protein, 11 aa, Homo sapiens
GHQAFDVGQPR

SEQ ID NO: 3736 - protein, 11 aa, Homo sapiens
GHQAFDVGQPR

SEQ ID NO: 3737 - protein, 11 aa, Homo sapiens
GHQAFDVGQPR

SEQ ID NO: 3738 - protein, 11 aa, Homo sapiens
TYHSVGDSVLR

SEQ ID NO: 3739 - protein, 11 aa, Homo sapiens
TYHSVGDSVLR

SEQ ID NO: 3740 - protein, 11 aa, Homo sapiens
TYHSVGDSVLR

SEQ ID NO: 3741 - protein, 11 aa, Homo sapiens
TYHSVGDSVLR

SEQ ID NO: 3742 - protein, 12 aa, Homo sapiens
VPIDGPPIDIGR

SEQ ID NO: 3743 - protein, 12 aa, Homo sapiens
VPIDGPPIDIGR

SEQ ID NO: 3744 - protein, 12 aa, Homo sapiens
VPIDGPPIDIGR

SEQ ID NO: 3745 - protein, 12 aa, Homo sapiens
VPIDGPPIDIGR

SEQ ID NO: 3746 - protein, 11 aa, Homo sapiens
YVDQVLQLVYK

SEQ ID NO: 3747 - protein, 10 aa, Homo sapiens
ADGALTQEEK

SEQ ID NO: 3748 - protein, 10 aa, Homo sapiens
ADGALTQEEK

SEQ ID NO: 3749 - protein, 10 aa, Homo sapiens
ADGALTQEEK

SEQ ID NO: 3750 - protein, 10 aa, Homo sapiens
ADGALTQEEK

SEQ ID NO: 3751 - protein, 9 aa, Homo sapiens
DFEIISDTK

SEQ ID NO: 3752 - protein, 9 aa, Homo sapiens
DFEIISDTK

SEQ ID NO: 3753 - protein, 9 aa, Homo sapiens
DFEIISDTK

SEQ ID NO: 3754 - protein, 9 aa, Homo sapiens
DFEIISDTK

SEQ ID NO: 3755 - protein, 16 aa, Homo sapiens
GVVAEFDSPANLIAAR

SEQ ID NO: 3756 - protein, 16 aa, Homo sapiens
GVVAEFDSPANLIAAR

SEQ ID NO: 3757 - protein, 16 aa, Homo sapiens
GVVAEFDSPANLIAAR

SEQ ID NO: 3758 - protein, 16 aa, Homo sapiens
GVVAEFDSPANLIAAR

SEQ ID NO: 3759 - protein, 15 aa, Homo sapiens
IDGLNVADIGLHDLR

SEQ ID NO: 3760 - protein, 15 aa, Homo sapiens
IDGLNVADIGLHDLR

SEQ ID NO: 3761 - protein, 15 aa, Homo sapiens
IDGLNVADIGLHDLR

SEQ ID NO: 3762 - protein, 15 aa, Homo sapiens
IDGLNVADIGLHDLR

SEQ ID NO: 3763 - protein, 17 aa, Homo sapiens
NVDPNPYPETSAGFLSR

SEQ ID NO: 3764 - protein, 17 aa, Homo sapiens
NVDPNPYPETSAGFLSR

SEQ ID NO: 3765 - protein, 17 aa, Homo sapiens
NVDPNPYPETSAGFLSR

SEQ ID NO: 3766 - protein, 17 aa, Homo sapiens
NVDPNPYPETSAGFLSR

SEQ ID NO: 3767 - protein, 17 aa, Homo sapiens
EGTINVHDVETQFNQYK

SEQ ID NO: 3768 - protein, 11 aa, Homo sapiens
QGGFLGLSNIK

SEQ ID NO: 3769 - protein, 9 aa, Homo sapiens
SSVPSSTEK

SEQ ID NO: 3770 - protein, 9 aa, Homo sapiens
SSVPSSTEK

SEQ ID NO: 3771 - protein, 9 aa, Homo sapiens
SSVPSSTEK

SEQ ID NO: 3772 - protein, 9 aa, Homo sapiens
SSVPSSTEK

SEQ ID NO: 3773 - protein, 24 aa, Homo sapiens
VSAGNGGSSLSYTNPAVAATSANL

SEQ ID NO: 3774 - protein, 9 aa, Homo sapiens
YVPPSSTDR

SEQ ID NO: 3775 - protein, 9 aa, Homo sapiens
YVPPSSTDR

SEQ ID NO: 3776 - protein, 9 aa, Homo sapiens
YVPPSSTDR

SEQ ID NO: 3777 - protein, 9 aa, Homo sapiens
YVPPSSTDR

SEQ ID NO: 3778 - protein, 19 aa, Homo sapiens
ALFSSNLDPSLVEQVFLDK

SEQ ID NO: 3779 - protein, 11 aa, Homo sapiens
DSLYVNGFNPR

SEQ ID NO: 3780 - protein, 11 aa, Homo sapiens
DSLYVNGFNPR

SEQ ID NO: 3781 - protein, 11 aa, Homo sapiens
DSLYVNGFNPR

SEQ ID NO: 3782 - protein, 11 aa, Homo sapiens
DSLYVNGFNPR

SEQ ID NO: 3783 - protein, 8 aa, Homo sapiens
LTLLRPEK

SEQ ID NO: 3784 - protein, 8 aa, Homo sapiens
LTLLRPEK

SEQ ID NO: 3785 - protein, 8 aa, Homo sapiens
LTLLRPEK

SEQ ID NO: 3786 - protein, 8 aa, Homo sapiens
LTLLRPEK

SEQ ID NO: 3787 - protein, 11 aa, Homo sapiens
VLQGLLTPLFR

SEQ ID NO: 3788 - protein, 11 aa, Homo sapiens
VLQGLLTPLFR

SEQ ID NO: 3789 - protein, 11 aa, Homo sapiens
VLQGLLTPLFR

SEQ ID NO: 3790 - protein, 11 aa, Homo sapiens
VLQGLLTPLFR

SEQ ID NO: 3791 - protein, 19 aa, Homo sapiens
VPTGTITEVSSTGVNSSSK

SEQ ID NO: 3792 - protein, 19 aa, Homo sapiens
VPTGTITEVSSTGVNSSSK

SEQ ID NO: 3793 - protein, 19 aa, Homo sapiens
VPTGTITEVSSTGVNSSSK

SEQ ID NO: 3794 - protein, 19 aa, Homo sapiens
VPTGTITEVSSTGVNSSSK

SEQ ID NO: 3795 - protein, 15 aa, Homo sapiens
FLNSNSGLQGLQFYR

SEQ ID NO: 3796 - protein, 15 aa, Homo sapiens
FLNSNSGLQGLQFYR

SEQ ID NO: 3797 - protein, 15 aa, Homo sapiens
FLNSNSGLQGLQFYR

SEQ ID NO: 3798 - protein, 15 aa, Homo sapiens
FLNSNSGLQGLQFYR

SEQ ID NO: 3799 - protein, 10 aa, Homo sapiens
IGLASALQPR

SEQ ID NO: 3800 - protein, 10 aa, Homo sapiens
IGLASALQPR

SEQ ID NO: 3801 - protein, 10 aa, Homo sapiens
IGLASALQPR

SEQ ID NO: 3802 - protein, 10 aa, Homo sapiens
IGLASALQPR

SEQ ID NO: 3803 - protein, 14 aa, Homo sapiens
NDVVFQPISGEDVR

SEQ ID NO: 3804 - protein, 14 aa, Homo sapiens
NDVVFQPISGEDVR

SEQ ID NO: 3805 - protein, 14 aa, Homo sapiens
NDVVFQPISGEDVR

SEQ ID NO: 3806 - protein, 14 aa, Homo sapiens
NDVVFQPISGEDVR

SEQ ID NO: 3807 - protein, 12 aa, Homo sapiens
SLEPFTLEILAR

SEQ ID NO: 3808 - protein, 12 aa, Homo sapiens
SLEPFTLEILAR

SEQ ID NO: 3809 - protein, 12 aa, Homo sapiens
SLEPFTLEILAR

SEQ ID NO: 3810 - protein, 12 aa, Homo sapiens
SLEPFTLEILAR

SEQ ID NO: 3811 - protein, 12 aa, Homo sapiens
STAAPIPILPER

SEQ ID NO: 3812 - protein, 12 aa, Homo sapiens
STAAPIPILPER

SEQ ID NO: 3813 - protein, 12 aa, Homo sapiens
STAAPIPILPER

SEQ ID NO: 3814 - protein, 12 aa, Homo sapiens
STAAPIPILPER

SEQ ID NO: 3815 - protein, 14 aa, Homo sapiens
AVTLSLDGGDTAIR

SEQ ID NO: 3816 - protein, 14 aa, Homo sapiens
AVTLSLDGGDTAIR

SEQ ID NO: 3817 - protein, 14 aa, Homo sapiens
AVTLSLDGGDTAIR

SEQ ID NO: 3818 - protein, 14 aa, Homo sapiens
AVTLSLDGGDTAIR

SEQ ID NO: 3819 - protein, 10 aa, Homo sapiens
LTDPNSAFSR

SEQ ID NO: 3820 - protein, 10 aa, Homo sapiens
LTDPNSAFSR

SEQ ID NO: 3821 - protein, 10 aa, Homo sapiens
LTDPNSAFSR

SEQ ID NO: 3822 - protein, 10 aa, Homo sapiens
LTDPNSAFSR

SEQ ID NO: 3823 - protein, 11 aa, Homo sapiens
LTPLQFGNLQK

SEQ ID NO: 3824 - protein, 11 aa, Homo sapiens
LTPLQFGNLQK

SEQ ID NO: 3825 - protein, 11 aa, Homo sapiens
LTPLQFGNLQK

SEQ ID NO: 3826 - protein, 11 aa, Homo sapiens
LTPLQFGNLQK

SEQ ID NO: 3827 - protein, 14 aa, Homo sapiens
SVVGDALEFGNSWK

SEQ ID NO: 3828 - protein, 14 aa, Homo sapiens
SVVGDALEFGNSWK

SEQ ID NO: 3829 - protein, 14 aa, Homo sapiens
SVVGDALEFGNSWK

SEQ ID NO: 3830 - protein, 14 aa, Homo sapiens
SVVGDALEFGNSWK

SEQ ID NO: 3831 - protein, 13 aa, Homo sapiens
TGLLVEQSGDYIK

SEQ ID NO: 3832 - protein, 13 aa, Homo sapiens
TGLLVEQSGDYIK

SEQ ID NO: 3833 - protein, 13 aa, Homo sapiens
TGLLVEQSGDYIK

SEQ ID NO: 3834 - protein, 13 aa, Homo sapiens
TGLLVEQSGDYIK

SEQ ID NO: 3835 - protein, 9 aa, Homo sapiens
WVGDLPNGR

SEQ ID NO: 3836 - protein, 11 aa, Homo sapiens
EHFQDDVFNEK

SEQ ID NO: 3837 - protein, 11 aa, Homo sapiens
EHFQDDVFNEK

SEQ ID NO: 3838 - protein, 11 aa, Homo sapiens
EHFQDDVFNEK

SEQ ID NO: 3839 - protein, 11 aa, Homo sapiens
EHFQDDVFNEK

SEQ ID NO: 3840 - protein, 16 aa, Homo sapiens
GDLEEYGQDLLHTVFK

SEQ ID NO: 3841 - protein, 16 aa, Homo sapiens
GDLEEYGQDLLHTVFK

SEQ ID NO: 3842 - protein, 16 aa, Homo sapiens
GDLEEYGQDLLHTVFK

SEQ ID NO: 3843 - protein, 16 aa, Homo sapiens
GDLEEYGQDLLHTVFK

SEQ ID NO: 3844 - protein, 21 aa, Homo sapiens
STQAPLIIRPDSGNPLDTVLK

SEQ ID NO: 3845 - protein, 21 aa, Homo sapiens
STQAPLIIRPDSGNPLDTVLK

SEQ ID NO: 3846 - protein, 21 aa, Homo sapiens
STQAPLIIRPDSGNPLDTVLK

SEQ ID NO: 3847 - protein, 21 aa, Homo sapiens
STQAPLIIRPDSGNPLDTVLK

SEQ ID NO: 3848 - protein, 10 aa, Homo sapiens
YDGHLPIEIK

SEQ ID NO: 3849 - protein, 10 aa, Homo sapiens
YDGHLPIEIK

SEQ ID NO: 3850 - protein, 10 aa, Homo sapiens
YDGHLPIEIK

SEQ ID NO: 3851 - protein, 10 aa, Homo sapiens
YDGHLPIEIK

SEQ ID NO: 3852 - protein, 15 aa, Homo sapiens
YLLETSGNLDGLEYK

SEQ ID NO: 3853 - protein, 15 aa, Homo sapiens
YLLETSGNLDGLEYK

SEQ ID NO: 3854 - protein, 15 aa, Homo sapiens
YLLETSGNLDGLEYK

SEQ ID NO: 3855 - protein, 15 aa, Homo sapiens
YLLETSGNLDGLEYK

SEQ ID NO: 3856 - protein, 11 aa, Homo sapiens
ASSSFQANGTK

SEQ ID NO: 3857 - protein, 11 aa, Homo sapiens
ASSSFQANGTK

SEQ ID NO: 3858 - protein, 11 aa, Homo sapiens
ASSSFQANGTK

SEQ ID NO: 3859 - protein, 11 aa, Homo sapiens
ASSSFQANGTK

SEQ ID NO: 3860 - protein, 9 aa, Homo sapiens
FAIQYGTGR

SEQ ID NO: 3861 - protein, 9 aa, Homo sapiens
FAIQYGTGR

SEQ ID NO: 3862 - protein, 9 aa, Homo sapiens
FAIQYGTGR

SEQ ID NO: 3863 - protein, 9 aa, Homo sapiens
FAIQYGTGR

SEQ ID NO: 3864 - protein, 16 aa, Homo sapiens
GADLGWGETAQAQFPG

SEQ ID NO: 3865 - protein, 19 aa, Homo sapiens
LGAPSPGDKPIFVPLSNYR

SEQ ID NO: 3866 - protein, 19 aa, Homo sapiens
LGAPSPGDKPIFVPLSNYR

SEQ ID NO: 3867 - protein, 19 aa, Homo sapiens
LGAPSPGDKPIFVPLSNYR

SEQ ID NO: 3868 - protein, 19 aa, Homo sapiens
LGAPSPGDKPIFVPLSNYR

SEQ ID NO: 3869 - protein, 9 aa, Homo sapiens
VDGILSEDK

SEQ ID NO: 3870 - protein, 9 aa, Homo sapiens
VDGILSEDK

SEQ ID NO: 3871 - protein, 9 aa, Homo sapiens
VDGILSEDK

SEQ ID NO: 3872 - protein, 9 aa, Homo sapiens
VDGILSEDK

SEQ ID NO: 3873 - protein, 12 aa, Homo sapiens
AEALFDFTGNSK

SEQ ID NO: 3874 - protein, 12 aa, Homo sapiens
AEALFDFTGNSK

SEQ ID NO: 3875 - protein, 12 aa, Homo sapiens
AEALFDFTGNSK

SEQ ID NO: 3876 - protein, 12 aa, Homo sapiens
AEALFDFTGNSK

SEQ ID NO: 3877 - protein, 8 aa, Homo sapiens
DAEGDLVR

SEQ ID NO: 3878 - protein, 8 aa, Homo sapiens
DAEGDLVR

SEQ ID NO: 3879 - protein, 8 aa, Homo sapiens
DAEGDLVR

SEQ ID NO: 3880 - protein, 8 aa, Homo sapiens
DAEGDLVR

SEQ ID NO: 3881 - protein, 15 aa, Homo sapiens
DIAVEEDLSSTPLLK

SEQ ID NO: 3882 - protein, 15 aa, Homo sapiens
DIAVEEDLSSTPLLK

SEQ ID NO: 3883 - protein, 15 aa, Homo sapiens
DIAVEEDLSSTPLLK

SEQ ID NO: 3884 - protein, 15 aa, Homo sapiens
DIAVEEDLSSTPLLK

SEQ ID NO: 3885 - protein, 12 aa, Homo sapiens
GATGIFPLSFVK

SEQ ID NO: 3886 - protein, 12 aa, Homo sapiens
GATGIFPLSFVK

SEQ ID NO: 3887 - protein, 12 aa, Homo sapiens
GATGIFPLSFVK

SEQ ID NO: 3888 - protein, 12 aa, Homo sapiens
GATGIFPLSFVK

SEQ ID NO: 3889 - protein, 11 aa, Homo sapiens
SVSPQGNSVDR

SEQ ID NO: 3890 - protein, 11 aa, Homo sapiens
SVSPQGNSVDR

SEQ ID NO: 3891 - protein, 11 aa, Homo sapiens
SVSPQGNSVDR

SEQ ID NO: 3892 - protein, 11 aa, Homo sapiens
SVSPQGNSVDR

SEQ ID NO: 3893 - protein, 10 aa, Homo sapiens
DRPFFAGLVK

SEQ ID NO: 3894 - protein, 10 aa, Homo sapiens
DRPFFAGLVK

SEQ ID NO: 3895 - protein, 10 aa, Homo sapiens
DRPFFAGLVK

SEQ ID NO: 3896 - protein, 10 aa, Homo sapiens
DRPFFAGLVK

SEQ ID NO: 3897 - protein, 7 aa, Homo sapiens
EHYVDLK

SEQ ID NO: 3898 - protein, 7 aa, Homo sapiens
EHYVDLK

SEQ ID NO: 3899 - protein, 7 aa, Homo sapiens
EHYVDLK

SEQ ID NO: 3900 - protein, 7 aa, Homo sapiens
EHYVDLK

SEQ ID NO: 3901 - protein, 14 aa, Homo sapiens
NIIHGSDSVESAEK

SEQ ID NO: 3902 - protein, 14 aa, Homo sapiens
NIIHGSDSVESAEK

SEQ ID NO: 3903 - protein, 14 aa, Homo sapiens
NIIHGSDSVESAEK

SEQ ID NO: 3904 - protein, 14 aa, Homo sapiens
NIIHGSDSVESAEK

SEQ ID NO: 3905 - protein, 12 aa, Homo sapiens
TFIAIKPDGVQR

SEQ ID NO: 3906 - protein, 12 aa, Homo sapiens
TFIAIKPDGVQR

SEQ ID NO: 3907 - protein, 12 aa, Homo sapiens
TFIAIKPDGVQR

SEQ ID NO: 3908 - protein, 12 aa, Homo sapiens
TFIAIKPDGVQR

SEQ ID NO: 3909 - protein, 7 aa, Homo sapiens
ASEEHLK

SEQ ID NO: 3910 - protein, 7 aa, Homo sapiens
ASEEHLK

SEQ ID NO: 3911 - protein, 7 aa, Homo sapiens
ASEEHLK

SEQ ID NO: 3912 - protein, 7 aa, Homo sapiens
ASEEHLK

SEQ ID NO: 3913 - protein, 10 aa, Homo sapiens
DRPFFPGLVK

SEQ ID NO: 3914 - protein, 10 aa, Homo sapiens
DRPFFPGLVK

SEQ ID NO: 3915 - protein, 10 aa, Homo sapiens
DRPFFPGLVK

SEQ ID NO: 3916 - protein, 10 aa, Homo sapiens
DRPFFPGLVK

SEQ ID NO: 3917 - protein, 15 aa, Homo sapiens
EISLWFKPEELVDYK

SEQ ID NO: 3918 - protein, 15 aa, Homo sapiens
EISLWFKPEELVDYK

SEQ ID NO: 3919 - protein, 15 aa, Homo sapiens
EISLWFKPEELVDYK

SEQ ID NO: 3920 - protein, 15 aa, Homo sapiens
EISLWFKPEELVDYK

SEQ ID NO: 3921 - protein, 10 aa, Homo sapiens
NIIHGSDSVK

SEQ ID NO: 3922 - protein, 10 aa, Homo sapiens
NIIHGSDSVK

SEQ ID NO: 3923 - protein, 10 aa, Homo sapiens
NIIHGSDSVK

SEQ ID NO: 3924 - protein, 10 aa, Homo sapiens
NIIHGSDSVK

SEQ ID NO: 3925 - protein, 12 aa, Homo sapiens
TFIAIKPDGVQR

SEQ ID NO: 3926 - protein, 12 aa, Homo sapiens
TFIAIKPDGVQR

SEQ ID NO: 3927 - protein, 12 aa, Homo sapiens
TFIAIKPDGVQR

SEQ ID NO: 3928 - protein, 12 aa, Homo sapiens
TFIAIKPDGVQR

SEQ ID NO: 3929 - protein, 9 aa, Homo sapiens
FEAPLFNAR

SEQ ID NO: 3930 - protein, 9 aa, Homo sapiens
FEAPLFNAR

SEQ ID NO: 3931 - protein, 9 aa, Homo sapiens
FEAPLFNAR

SEQ ID NO: 3932 - protein, 9 aa, Homo sapiens
FEAPLFNAR

SEQ ID NO: 3933 - protein, 17 aa, Homo sapiens
ILQDIASGSHPFSQVLK

SEQ ID NO: 3934 - protein, 17 aa, Homo sapiens
ILQDIASGSHPFSQVLK

SEQ ID NO: 3935 - protein, 17 aa, Homo sapiens
ILQDIASGSHPFSQVLK

SEQ ID NO: 3936 - protein, 17 aa, Homo sapiens
ILQDIASGSHPFSQVLK

SEQ ID NO: 3937 - protein, 19 aa, Homo sapiens
LVNQQLLADPLVPPQLTIK

SEQ ID NO: 3938 - protein, 19 aa, Homo sapiens
LVNQQLLADPLVPPQLTIK

SEQ ID NO: 3939 - protein, 19 aa, Homo sapiens
LVNQQLLADPLVPPQLTIK

SEQ ID NO: 3940 - protein, 19 aa, Homo sapiens
LVNQQLLADPLVPPQLTIK

SEQ ID NO: 3941 - protein, 16 aa, Homo sapiens
NDGAAILAAVSSIAQK

SEQ ID NO: 3942 - protein, 16 aa, Homo sapiens
NDGAAILAAVSSIAQK

SEQ ID NO: 3943 - protein, 16 aa, Homo sapiens
NDGAAILAAVSSIAQK

SEQ ID NO: 3944 - protein, 16 aa, Homo sapiens
NDGAAILAAVSSIAQK

SEQ ID NO: 3945 - protein, 10 aa, Homo sapiens
SATYVNTEGR

SEQ ID NO: 3946 - protein, 10 aa, Homo sapiens
SATYVNTEGR

SEQ ID NO: 3947 - protein, 10 aa, Homo sapiens
SATYVNTEGR

SEQ ID NO: 3948 - protein, 10 aa, Homo sapiens
SATYVNTEGR

SEQ ID NO: 3949 - protein, 18 aa, Homo sapiens
EPAVIGRPDFEHAVEASK

SEQ ID NO: 3950 - protein, 18 aa, Homo sapiens
EPAVIGRPDFEHAVEASK

SEQ ID NO: 3951 - protein, 18 aa, Homo sapiens
EPAVIGRPDFEHAVEASK

SEQ ID NO: 3952 - protein, 18 aa, Homo sapiens
EPAVIGRPDFEHAVEASK

SEQ ID NO: 3953 - protein, 13 aa, Homo sapiens
GFTPVVDDPVTER

SEQ ID NO: 3954 - protein, 10 aa, Homo sapiens
GNAVLQSQVK

SEQ ID NO: 3955 - protein, 10 aa, Homo sapiens
GNAVLQSQVK

SEQ ID NO: 3956 - protein, 10 aa, Homo sapiens
GNAVLQSQVK

SEQ ID NO: 3957 - protein, 10 aa, Homo sapiens
GNAVLQSQVK

SEQ ID NO: 3958 - protein, 10 aa, Homo sapiens
NIGAFISEAK

SEQ ID NO: 3959 - protein, 10 aa, Homo sapiens
NIGAFISEAK

SEQ ID NO: 3960 - protein, 10 aa, Homo sapiens
NIGAFISEAK

SEQ ID NO: 3961 - protein, 10 aa, Homo sapiens
NIGAFISEAK

SEQ ID NO: 3962 - protein, 19 aa, Homo sapiens
TDPGSIFDLDPLEDNIQSR

SEQ ID NO: 3963 - protein, 19 aa, Homo sapiens
TDPGSIFDLDPLEDNIQSR

SEQ ID NO: 3964 - protein, 19 aa, Homo sapiens
TDPGSIFDLDPLEDNIQSR

SEQ ID NO: 3965 - protein, 19 aa, Homo sapiens
TDPGSIFDLDPLEDNIQSR

SEQ ID NO: 3966 - protein, 14 aa, Homo sapiens
DSVSDGFVQENQPR

SEQ ID NO: 3967 - protein, 14 aa, Homo sapiens
DSVSDGFVQENQPR

SEQ ID NO: 3968 - protein, 14 aa, Homo sapiens
DSVSDGFVQENQPR

SEQ ID NO: 3969 - protein, 14 aa, Homo sapiens
DSVSDGFVQENQPR

SEQ ID NO: 3970 - protein, 11 aa, Homo sapiens
DYSPELAELIR

SEQ ID NO: 3971 - protein, 11 aa, Homo sapiens
DYSPELAELIR

SEQ ID NO: 3972 - protein, 11 aa, Homo sapiens
DYSPELAELIR

SEQ ID NO: 3973 - protein, 11 aa, Homo sapiens
DYSPELAELIR

SEQ ID NO: 3974 - protein, 10 aa, Homo sapiens
GSYGEVTLVK

SEQ ID NO: 3975 - protein, 10 aa, Homo sapiens
GSYGEVTLVK

SEQ ID NO: 3976 - protein, 10 aa, Homo sapiens
GSYGEVTLVK

SEQ ID NO: 3977 - protein, 10 aa, Homo sapiens
GSYGEVTLVK

SEQ ID NO: 3978 - protein, 13 aa, Homo sapiens
LLGSSDSPASASR

SEQ ID NO: 3979 - protein, 13 aa, Homo sapiens
LLGSSDSPASASR

SEQ ID NO: 3980 - protein, 13 aa, Homo sapiens
LLGSSDSPASASR

SEQ ID NO: 3981 - protein, 13 aa, Homo sapiens
LLGSSDSPASASR

SEQ ID NO: 3982 - protein, 8 aa, Homo sapiens
VDVTSTQK

SEQ ID NO: 3983 - protein, 8 aa, Homo sapiens
VDVTSTQK

SEQ ID NO: 3984 - protein, 8 aa, Homo sapiens
VDVTSTQK

SEQ ID NO: 3985 - protein, 8 aa, Homo sapiens
VDVTSTQK

SEQ ID NO: 3986 - protein, 6 aa, Homo sapiens
AGDWWK

SEQ ID NO: 3987 - protein, 6 aa, Homo sapiens
AGDWWK

SEQ ID NO: 3988 - protein, 6 aa, Homo sapiens
AGDWWK

SEQ ID NO: 3989 - protein, 6 aa, Homo sapiens
AGDWWK

SEQ ID NO: 3990 - protein, 15 aa, Homo sapiens
DSYFYAVSDLQVGGR

SEQ ID NO: 3991 - protein, 10 aa, Homo sapiens
FTVNIISVYK

SEQ ID NO: 3992 - protein, 16 aa, Homo sapiens
LHTFGDENEDDSELAR

SEQ ID NO: 3993 - protein, 8 aa, Homo sapiens
SSLVIQWR

SEQ ID NO: 3994 - protein, 8 aa, Homo sapiens
SSLVIQWR

SEQ ID NO: 3995 - protein, 8 aa, Homo sapiens
SSLVIQWR

SEQ ID NO: 3996 - protein, 8 aa, Homo sapiens
SSLVIQWR

SEQ ID NO: 3997 - protein, 19 aa, Homo sapiens
LVQLAGAPEPFEPAQPDAY

SEQ ID NO: 3998 - protein, 19 aa, Homo sapiens
LVQLAGAPEPFEPAQPDAY

SEQ ID NO: 3999 - protein, 19 aa, Homo sapiens
LVQLAGAPEPFEPAQPDAY

SEQ ID NO: 4000 - protein, 19 aa, Homo sapiens
LVQLAGAPEPFEPAQPDAY

SEQ ID NO: 4001 - protein, 16 aa, Homo sapiens
SNATQLDGPAGALLLR

SEQ ID NO: 4002 - protein, 16 aa, Homo sapiens
SNATQLDGPAGALLLR

SEQ ID NO: 4003 - protein, 16 aa, Homo sapiens
SNATQLDGPAGALLLR

SEQ ID NO: 4004 - protein, 16 aa, Homo sapiens
SNATQLDGPAGALLLR

SEQ ID NO: 4005 - protein, 7 aa, Homo sapiens
ELTSELK

SEQ ID NO: 4006 - protein, 7 aa, Homo sapiens
ELTSELK

SEQ ID NO: 4007 - protein, 7 aa, Homo sapiens
ELTSELK

SEQ ID NO: 4008 - protein, 7 aa, Homo sapiens
ELTSELK

SEQ ID NO: 4009 - protein, 6 aa, Homo sapiens
ITLYGR

SEQ ID NO: 4010 - protein, 6 aa, Homo sapiens
ITLYGR

SEQ ID NO: 4011 - protein, 6 aa, Homo sapiens
ITLYGR

SEQ ID NO: 4012 - protein, 6 aa, Homo sapiens
ITLYGR

SEQ ID NO: 4013 - protein, 11 aa, Homo sapiens
SYPGLTSYLVR

SEQ ID NO: 4014 - protein, 11 aa, Homo sapiens
SYPGLTSYLVR

SEQ ID NO: 4015 - protein, 11 aa, Homo sapiens
SYPGLTSYLVR

SEQ ID NO: 4016 - protein, 11 aa, Homo sapiens
SYPGLTSYLVR

SEQ ID NO: 4017 - protein, 15 aa, Homo sapiens
VPLQQNFQDNQFQGK

SEQ ID NO: 4018 - protein, 15 aa, Homo sapiens
VPLQQNFQDNQFQGK

SEQ ID NO: 4019 - protein, 15 aa, Homo sapiens
VPLQQNFQDNQFQGK

SEQ ID NO: 4020 - protein, 15 aa, Homo sapiens
VPLQQNFQDNQFQGK

SEQ ID NO: 4021 - protein, 13 aa, Homo sapiens
WYVVGLAGNAILR

SEQ ID NO: 4022 - protein, 13 aa, Homo sapiens
WYVVGLAGNAILR

SEQ ID NO: 4023 - protein, 13 aa, Homo sapiens
WYVVGLAGNAILR

SEQ ID NO: 4024 - protein, 13 aa, Homo sapiens
WYVVGLAGNAILR

SEQ ID NO: 4025 - protein, 14 aa, Homo sapiens
GDGDVAWQHTQLFR

SEQ ID NO: 4026 - protein, 9 aa, Homo sapiens
IGNTAFSTR

SEQ ID NO: 4027 - protein, 9 aa, Homo sapiens
IGNTAFSTR

SEQ ID NO: 4028 - protein, 9 aa, Homo sapiens
IGNTAFSTR

SEQ ID NO: 4029 - protein, 9 aa, Homo sapiens
IGNTAFSTR

SEQ ID NO: 4030 - protein, 12 aa, Homo sapiens
IIVELVEFISPK

SEQ ID NO: 4031 - protein, 11 aa, Homo sapiens
LLLTYADNILR

SEQ ID NO: 4032 - protein, 11 aa, Homo sapiens
LLLTYADNILR

SEQ ID NO: 4033 - protein, 11 aa, Homo sapiens
LLLTYADNILR

SEQ ID NO: 4034 - protein, 11 aa, Homo sapiens
LLLTYADNILR

SEQ ID NO: 4035 - protein, 27 aa, Homo sapiens
SSQQPAASTQLPTTPSSNPSGLNQHTR

SEQ ID NO: 4036 - protein, 14 aa, Homo sapiens
SVDPDSPAEASGLR

SEQ ID NO: 4037 - protein, 14 aa, Homo sapiens
SVDPDSPAEASGLR

SEQ ID NO: 4038 - protein, 14 aa, Homo sapiens
SVDPDSPAEASGLR

SEQ ID NO: 4039 - protein, 14 aa, Homo sapiens
SVDPDSPAEASGLR

SEQ ID NO: 4040 - protein, 12 aa, Homo sapiens
EFPVYLWQPFFR

SEQ ID NO: 4041 - protein, 12 aa, Homo sapiens
EFPVYLWQPFFR

SEQ ID NO: 4042 - protein, 12 aa, Homo sapiens
EFPVYLWQPFFR

SEQ ID NO: 4043 - protein, 12 aa, Homo sapiens
EFPVYLWQPFFR

SEQ ID NO: 4044 - protein, 13 aa, Homo sapiens
EVNEVSQNFQTTK

SEQ ID NO: 4045 - protein, 13 aa, Homo sapiens
EVNEVSQNFQTTK

SEQ ID NO: 4046 - protein, 13 aa, Homo sapiens
EVNEVSQNFQTTK

SEQ ID NO: 4047 - protein, 13 aa, Homo sapiens
EVNEVSQNFQTTK

SEQ ID NO: 4048 - protein, 23 aa, Homo sapiens
GESLSLPGPSPPPDGTEQVIISR

SEQ ID NO: 4049 - protein, 11 aa, Homo sapiens
NDYAVESYENK

SEQ ID NO: 4050 - protein, 11 aa, Homo sapiens
NDYAVESYENK

SEQ ID NO: 4051 - protein, 11 aa, Homo sapiens
NDYAVESYENK

SEQ ID NO: 4052 - protein, 11 aa, Homo sapiens
NDYAVESYENK

SEQ ID NO: 4053 - protein, 14 aa, Homo sapiens
VLTSEDEYNLLSDR

SEQ ID NO: 4054 - protein, 14 aa, Homo sapiens
VLTSEDEYNLLSDR

SEQ ID NO: 4055 - protein, 14 aa, Homo sapiens
VLTSEDEYNLLSDR

SEQ ID NO: 4056 - protein, 14 aa, Homo sapiens
VLTSEDEYNLLSDR

SEQ ID NO: 4057 - protein, 8 aa, Homo sapiens
GYFLFRPR

SEQ ID NO: 4058 - protein, 14 aa, Homo sapiens
VDEEFQSPFASQSR

SEQ ID NO: 4059 - protein, 14 aa, Homo sapiens
VDEEFQSPFASQSR

SEQ ID NO: 4060 - protein, 14 aa, Homo sapiens
VDEEFQSPFASQSR

SEQ ID NO: 4061 - protein, 14 aa, Homo sapiens
VDEEFQSPFASQSR

SEQ ID NO: 4062 - protein, 29 aa, Homo sapiens
EGNKPVLFQGNTNPTDVVVAVFPKPLITR

SEQ ID NO: 4063 - protein, 15 aa, Homo sapiens
FVSDYETHGAGFSIR

SEQ ID NO: 4064 - protein, 15 aa, Homo sapiens
FVSDYETHGAGFSIR

SEQ ID NO: 4065 - protein, 15 aa, Homo sapiens
FVSDYETHGAGFSIR

SEQ ID NO: 4066 - protein, 15 aa, Homo sapiens
FVSDYETHGAGFSIR

SEQ ID NO: 4067 - protein, 13 aa, Homo sapiens
FVTAVGTQGAISK

SEQ ID NO: 4068 - protein, 13 aa, Homo sapiens
FVTAVGTQGAISK

SEQ ID NO: 4069 - protein, 13 aa, Homo sapiens
FVTAVGTQGAISK

SEQ ID NO: 4070 - protein, 13 aa, Homo sapiens
FVTAVGTQGAISK

SEQ ID NO: 4071 - protein, 21 aa, Homo sapiens
IESPGYLTSPGYPHSYHPSEK

SEQ ID NO: 4072 - protein, 21 aa, Homo sapiens
IESPGYLTSPGYPHSYHPSEK

SEQ ID NO: 4073 - protein, 21 aa, Homo sapiens
IESPGYLTSPGYPHSYHPSEK

SEQ ID NO: 4074 - protein, 21 aa, Homo sapiens
IESPGYLTSPGYPHSYHPSEK

SEQ ID NO: 4075 - protein, 14 aa, Homo sapiens
SFEGNNNYDTPELR

SEQ ID NO: 4076 - protein, 14 aa, Homo sapiens
SFEGNNNYDTPELR

SEQ ID NO: 4077 - protein, 14 aa, Homo sapiens
SFEGNNNYDTPELR

SEQ ID NO: 4078 - protein, 14 aa, Homo sapiens
SFEGNNNYDTPELR

SEQ ID NO: 4079 - protein, 6 aa, Homo sapiens
EAINFR

SEQ ID NO: 4080 - protein, 20 aa, Homo sapiens
IIILLGFLGATLSAPLIPQR

SEQ ID NO: 4081 - protein, 6 aa, Homo sapiens
SPQQTR

SEQ ID NO: 4082 - protein, 6 aa, Homo sapiens
SPQQTR

SEQ ID NO: 4083 - protein, 6 aa, Homo sapiens
SPQQTR

SEQ ID NO: 4084 - protein, 6 aa, Homo sapiens
SPQQTR

SEQ ID NO: 4085 - protein, 17 aa, Homo sapiens
AIPVAQDLNAPSDWDSR

SEQ ID NO: 4086 - protein, 17 aa, Homo sapiens
AIPVAQDLNAPSDWDSR

SEQ ID NO: 4087 - protein, 17 aa, Homo sapiens
AIPVAQDLNAPSDWDSR

SEQ ID NO: 4088 - protein, 17 aa, Homo sapiens
AIPVAQDLNAPSDWDSR

SEQ ID NO: 4089 - protein, 19 aa, Homo sapiens
DSYETSQLDDQSAETHSHK

SEQ ID NO: 4090 - protein, 19 aa, Homo sapiens
DSYETSQLDDQSAETHSHK

SEQ ID NO: 4091 - protein, 19 aa, Homo sapiens
DSYETSQLDDQSAETHSHK

SEQ ID NO: 4092 - protein, 19 aa, Homo sapiens
DSYETSQLDDQSAETHSHK

SEQ ID NO: 4093 - protein, 9 aa, Homo sapiens
GDSVVYGLR

SEQ ID NO: 4094 - protein, 13 aa, Homo sapiens
ISHELDSASSEVN

SEQ ID NO: 4095 - protein, 16 aa, Homo sapiens
YPDAVATWLNPDPSQK

SEQ ID NO: 4096 - protein, 16 aa, Homo sapiens
YPDAVATWLNPDPSQK

SEQ ID NO: 4097 - protein, 16 aa, Homo sapiens
YPDAVATWLNPDPSQK

SEQ ID NO: 4098 - protein, 16 aa, Homo sapiens
YPDAVATWLNPDPSQK

SEQ ID NO: 4099 - protein, 9 aa, Homo sapiens
DGEAFLLTN

SEQ ID NO: 4100 - protein, 16 aa, Homo sapiens
QGVLDLPNDVVEGSAR

SEQ ID NO: 4101 - protein, 16 aa, Homo sapiens
QGVLDLPNDVVEGSAR

SEQ ID NO: 4102 - protein, 16 aa, Homo sapiens
QGVLDLPNDVVEGSAR

SEQ ID NO: 4103 - protein, 16 aa, Homo sapiens
QGVLDLPNDVVEGSAR

SEQ ID NO: 4104 - protein, 12 aa, Homo sapiens
SDPLAFITFSAK

SEQ ID NO: 4105 - protein, 12 aa, Homo sapiens
SDPLAFITFSAK

SEQ ID NO: 4106 - protein, 12 aa, Homo sapiens
SDPLAFITFSAK

SEQ ID NO: 4107 - protein, 12 aa, Homo sapiens
SDPLAFITFSAK

SEQ ID NO: 4108 - protein, 17 aa, Homo sapiens
SEVTQAPGQYTVDVEGR

SEQ ID NO: 4109 - protein, 17 aa, Homo sapiens
SEVTQAPGQYTVDVEGR

SEQ ID NO: 4110 - protein, 17 aa, Homo sapiens
SEVTQAPGQYTVDVEGR

SEQ ID NO: 4111 - protein, 17 aa, Homo sapiens
SEVTQAPGQYTVDVEGR

SEQ ID NO: 4112 - protein, 11 aa, Homo sapiens
SFLVEPEGIEK

SEQ ID NO: 4113 - protein, 11 aa, Homo sapiens
SFLVEPEGIEK

SEQ ID NO: 4114 - protein, 11 aa, Homo sapiens
SFLVEPEGIEK

SEQ ID NO: 4115 - protein, 11 aa, Homo sapiens
SFLVEPEGIEK

SEQ ID NO: 4116 - protein, 14 aa, Homo sapiens
DHVVSDFSEHGSLK

SEQ ID NO: 4117 - protein, 14 aa, Homo sapiens
DHVVSDFSEHGSLK

SEQ ID NO: 4118 - protein, 14 aa, Homo sapiens
DHVVSDFSEHGSLK

SEQ ID NO: 4119 - protein, 14 aa, Homo sapiens
DHVVSDFSEHGSLK

SEQ ID NO: 4120 - protein, 13 aa, Homo sapiens
FGLGAEVGISTSR

SEQ ID NO: 4121 - protein, 13 aa, Homo sapiens
FGLGAEVGISTSR

SEQ ID NO: 4122 - protein, 13 aa, Homo sapiens
FGLGAEVGISTSR

SEQ ID NO: 4123 - protein, 13 aa, Homo sapiens
FGLGAEVGISTSR

SEQ ID NO: 4124 - protein, 12 aa, Homo sapiens
GPVGLEGLLTTK

SEQ ID NO: 4125 - protein, 12 aa, Homo sapiens
GPVGLEGLLTTK

SEQ ID NO: 4126 - protein, 12 aa, Homo sapiens
GPVGLEGLLTTK

SEQ ID NO: 4127 - protein, 12 aa, Homo sapiens
GPVGLEGLLTTK

SEQ ID NO: 4128 - protein, 10 aa, Homo sapiens
HEILLSQSVR

SEQ ID NO: 4129 - protein, 16 aa, Homo sapiens
ILHLLTQEALSIHGVK

SEQ ID NO: 4130 - protein, 16 aa, Homo sapiens
ILHLLTQEALSIHGVK

SEQ ID NO: 4131 - protein, 16 aa, Homo sapiens
ILHLLTQEALSIHGVK

SEQ ID NO: 4132 - protein, 16 aa, Homo sapiens
ILHLLTQEALSIHGVK

SEQ ID NO: 4133 - protein, 10 aa, Homo sapiens
DIPHWLNPTR

SEQ ID NO: 4134 - protein, 10 aa, Homo sapiens
DIPHWLNPTR

SEQ ID NO: 4135 - protein, 10 aa, Homo sapiens
DIPHWLNPTR

SEQ ID NO: 4136 - protein, 10 aa, Homo sapiens
DIPHWLNPTR

SEQ ID NO: 4137 - protein, 15 aa, Homo sapiens
EQVDFQHHQLAEAFK

SEQ ID NO: 4138 - protein, 15 aa, Homo sapiens
EQVDFQHHQLAEAFK

SEQ ID NO: 4139 - protein, 15 aa, Homo sapiens
EQVDFQHHQLAEAFK

SEQ ID NO: 4140 - protein, 15 aa, Homo sapiens
EQVDFQHHQLAEAFK

SEQ ID NO: 4141 - protein, 10 aa, Homo sapiens
GYIEHFSLWK

SEQ ID NO: 4142 - protein, 10 aa, Homo sapiens
GYIEHFSLWK

SEQ ID NO: 4143 - protein, 10 aa, Homo sapiens
GYIEHFSLWK

SEQ ID NO: 4144 - protein, 10 aa, Homo sapiens
GYIEHFSLWK

SEQ ID NO: 4145 - protein, 13 aa, Homo sapiens
LDGSTHLNIFFAK

SEQ ID NO: 4146 - protein, 13 aa, Homo sapiens
LDGSTHLNIFFAK

SEQ ID NO: 4147 - protein, 13 aa, Homo sapiens
LDGSTHLNIFFAK

SEQ ID NO: 4148 - protein, 13 aa, Homo sapiens
LDGSTHLNIFFAK

SEQ ID NO: 4149 - protein, 16 aa, Homo sapiens
VSFSSPLVAISGVALR

SEQ ID NO: 4150 - protein, 16 aa, Homo sapiens
VSFSSPLVAISGVALR

SEQ ID NO: 4151 - protein, 16 aa, Homo sapiens
VSFSSPLVAISGVALR

SEQ ID NO: 4152 - protein, 16 aa, Homo sapiens
VSFSSPLVAISGVALR

SEQ ID NO: 4153 - protein, 10 aa, Homo sapiens
ALESELQQLR

SEQ ID NO: 4154 - protein, 10 aa, Homo sapiens
ALESELQQLR

SEQ ID NO: 4155 - protein, 10 aa, Homo sapiens
ALESELQQLR

SEQ ID NO: 4156 - protein, 10 aa, Homo sapiens
ALESELQQLR

SEQ ID NO: 4157 - protein, 16 aa, Homo sapiens
ELPLSPAFFGEDGIFR

SEQ ID NO: 4158 - protein, 16 aa, Homo sapiens
ELPLSPAFFGEDGIFR

SEQ ID NO: 4159 - protein, 16 aa, Homo sapiens
ELPLSPAFFGEDGIFR

SEQ ID NO: 4160 - protein, 16 aa, Homo sapiens
ELPLSPAFFGEDGIFR

SEQ ID NO: 4161 - protein, 10 aa, Homo sapiens
EQEPELSFLK

SEQ ID NO: 4162 - protein, 10 aa, Homo sapiens
EQEPELSFLK

SEQ ID NO: 4163 - protein, 10 aa, Homo sapiens
EQEPELSFLK

SEQ ID NO: 4164 - protein, 10 aa, Homo sapiens
EQEPELSFLK

SEQ ID NO: 4165 - protein, 10 aa, Homo sapiens
GLEEENAQLR

SEQ ID NO: 4166 - protein, 15 aa, Homo sapiens
QEGLTFFGTELAPVR

SEQ ID NO: 4167 - protein, 15 aa, Homo sapiens
QEGLTFFGTELAPVR

SEQ ID NO: 4168 - protein, 15 aa, Homo sapiens
QEGLTFFGTELAPVR

SEQ ID NO: 4169 - protein, 15 aa, Homo sapiens
QEGLTFFGTELAPVR

SEQ ID NO: 4170 - protein, 11 aa, Homo sapiens
IANPVEGSSGR

SEQ ID NO: 4171 - protein, 11 aa, Homo sapiens
IANPVEGSSGR

SEQ ID NO: 4172 - protein, 11 aa, Homo sapiens
IANPVEGSSGR

SEQ ID NO: 4173 - protein, 11 aa, Homo sapiens
IANPVEGSSGR

SEQ ID NO: 4174 - protein, 13 aa, Homo sapiens
IITLTGPTNAIFK

SEQ ID NO: 4175 - protein, 13 aa, Homo sapiens
IITLTGPTNAIFK

SEQ ID NO: 4176 - protein, 13 aa, Homo sapiens
IITLTGPTNAIFK

SEQ ID NO: 4177 - protein, 13 aa, Homo sapiens
IITLTGPTNAIFK

SEQ ID NO: 4178 - protein, 6 aa, Homo sapiens
LNQVAR

SEQ ID NO: 4179 - protein, 6 aa, Homo sapiens
LNQVAR

SEQ ID NO: 4180 - protein, 6 aa, Homo sapiens
LNQVAR

SEQ ID NO: 4181 - protein, 6 aa, Homo sapiens
LNQVAR

SEQ ID NO: 4182 - protein, 9 aa, Homo sapiens
QGANINEIR

SEQ ID NO: 4183 - protein, 9 aa, Homo sapiens
QGANINEIR

SEQ ID NO: 4184 - protein, 9 aa, Homo sapiens
QGANINEIR

SEQ ID NO: 4185 - protein, 9 aa, Homo sapiens
QGANINEIR

SEQ ID NO: 4186 - protein, 21 aa, Homo sapiens
QVTITGSAASISLAQYLINAR

SEQ ID NO: 4187 - protein, 8 aa, Homo sapiens
AFAMIIDK

SEQ ID NO: 4188 - protein, 8 aa, Homo sapiens
AFAMIIDK

SEQ ID NO: 4189 - protein, 8 aa, Homo sapiens
AFAMIIDK

SEQ ID NO: 4190 - protein, 8 aa, Homo sapiens
AFAMIIDK

SEQ ID NO: 4191 - protein, 20 aa, Homo sapiens
ESTGAQVQVAGDMLPNSTER

SEQ ID NO: 4192 - protein, 20 aa, Homo sapiens
ESTGAQVQVAGDMLPNSTER

SEQ ID NO: 4193 - protein, 20 aa, Homo sapiens
ESTGAQVQVAGDMLPNSTER

SEQ ID NO: 4194 - protein, 20 aa, Homo sapiens
ESTGAQVQVAGDMLPNSTER

SEQ ID NO: 4195 - protein, 23 aa, Homo sapiens
GVTIPYRPKPSSSPVIFAGGQDR

SEQ ID NO: 4196 - protein, 23 aa, Homo sapiens
GVTIPYRPKPSSSPVIFAGGQDR

SEQ ID NO: 4197 - protein, 23 aa, Homo sapiens
GVTIPYRPKPSSSPVIFAGGQDR

SEQ ID NO: 4198 - protein, 23 aa, Homo sapiens
GVTIPYRPKPSSSPVIFAGGQDR

SEQ ID NO: 4199 - protein, 11 aa, Homo sapiens
IANPVEGSTDR

SEQ ID NO: 4200 - protein, 11 aa, Homo sapiens
IANPVEGSTDR

SEQ ID NO: 4201 - protein, 11 aa, Homo sapiens
IANPVEGSTDR

SEQ ID NO: 4202 - protein, 11 aa, Homo sapiens
IANPVEGSTDR

SEQ ID NO: 4203 - protein, 13 aa, Homo sapiens
IITLAGPTNAIFK

SEQ ID NO: 4204 - protein, 13 aa, Homo sapiens
IITLAGPTNAIFK

SEQ ID NO: 4205 - protein, 13 aa, Homo sapiens
IITLAGPTNAIFK

SEQ ID NO: 4206 - protein, 13 aa, Homo sapiens
IITLAGPTNAIFK

SEQ ID NO: 4207 - protein, 31 aa, Homo sapiens
LHQLAMQQSHFPMTHGNTGFSGIESSSPEVK

SEQ ID NO: 4208 - protein, 11 aa, Homo sapiens
LSSETGGMGSS

SEQ ID NO: 4209 - protein, 17 aa, Homo sapiens
MDTGVIEGGLNVTLTIR

SEQ ID NO: 4210 - protein, 8 aa, Homo sapiens
QMSGAQIK

SEQ ID NO: 4211 - protein, 8 aa, Homo sapiens
QMSGAQIK

SEQ ID NO: 4212 - protein, 8 aa, Homo sapiens
QMSGAQIK

SEQ ID NO: 4213 - protein, 8 aa, Homo sapiens
QMSGAQIK

SEQ ID NO: 4214 - protein, 21 aa, Homo sapiens
QVTITGSAASISLAQYLINVR

SEQ ID NO: 4215 - protein, 16 aa, Homo sapiens
EGDSITYAIENGDPQR

SEQ ID NO: 4216 - protein, 16 aa, Homo sapiens
EGDSITYAIENGDPQR

SEQ ID NO: 4217 - protein, 16 aa, Homo sapiens
EGDSITYAIENGDPQR

SEQ ID NO: 4218 - protein, 16 aa, Homo sapiens
EGDSITYAIENGDPQR

SEQ ID NO: 4219 - protein, 15 aa, Homo sapiens
GGPPATIVAIDEESR

SEQ ID NO: 4220 - protein, 15 aa, Homo sapiens
GTAGGPDPTIELSLK

SEQ ID NO: 4221 - protein, 15 aa, Homo sapiens
GTAGGPDPTIELSLK

SEQ ID NO: 4222 - protein, 15 aa, Homo sapiens
GTAGGPDPTIELSLK

SEQ ID NO: 4223 - protein, 15 aa, Homo sapiens
GTAGGPDPTIELSLK

SEQ ID NO: 4224 - protein, 13 aa, Homo sapiens
VGAVLLNLQATDR

SEQ ID NO: 4225 - protein, 13 aa, Homo sapiens
VGAVLLNLQATDR

SEQ ID NO: 4226 - protein, 13 aa, Homo sapiens
VGAVLLNLQATDR

SEQ ID NO: 4227 - protein, 13 aa, Homo sapiens
VGAVLLNLQATDR

SEQ ID NO: 4228 - protein, 14 aa, Homo sapiens
VQADSLEVVLANLR

SEQ ID NO: 4229 - protein, 14 aa, Homo sapiens
VQADSLEVVLANLR

SEQ ID NO: 4230 - protein, 14 aa, Homo sapiens
VQADSLEVVLANLR

SEQ ID NO: 4231 - protein, 14 aa, Homo sapiens
VQADSLEVVLANLR

SEQ ID NO: 4232 - protein, 7 aa, Homo sapiens
IEDEEGS

SEQ ID NO: 4233 - protein, 9 aa, Homo sapiens
LSQTSNVDK

SEQ ID NO: 4234 - protein, 9 aa, Homo sapiens
LSQTSNVDK

SEQ ID NO: 4235 - protein, 9 aa, Homo sapiens
LSQTSNVDK

SEQ ID NO: 4236 - protein, 9 aa, Homo sapiens
LSQTSNVDK

SEQ ID NO: 4237 - protein, 8 aa, Homo sapiens
SEGFDTYR

SEQ ID NO: 4238 - protein, 8 aa, Homo sapiens
SEGFDTYR

SEQ ID NO: 4239 - protein, 8 aa, Homo sapiens
SEGFDTYR

SEQ ID NO: 4240 - protein, 8 aa, Homo sapiens
SEGFDTYR

SEQ ID NO: 4241 - protein, 7 aa, Homo sapiens
YLNFFTK

SEQ ID NO: 4242 - protein, 7 aa, Homo sapiens
YLNFFTK

SEQ ID NO: 4243 - protein, 7 aa, Homo sapiens
YLNFFTK

SEQ ID NO: 4244 - protein, 7 aa, Homo sapiens
YLNFFTK

SEQ ID NO: 4245 - protein, 6 aa, Homo sapiens
YYLAPK

SEQ ID NO: 4246 - protein, 6 aa, Homo sapiens
YYLAPK

SEQ ID NO: 4247 - protein, 6 aa, Homo sapiens
YYLAPK

SEQ ID NO: 4248 - protein, 6 aa, Homo sapiens
YYLAPK

SEQ ID NO: 4249 - protein, 26 aa, Homo sapiens
FGLNTVLTTDNSDLFINSIGIVPSVR

SEQ ID NO: 4250 - protein, 18 aa, Homo sapiens
IAIIGAGIGGTSAAYYLR

SEQ ID NO: 4251 - protein, 18 aa, Homo sapiens
IAIIGAGIGGTSAAYYLR

SEQ ID NO: 4252 - protein, 18 aa, Homo sapiens
IAIIGAGIGGTSAAYYLR

SEQ ID NO: 4253 - protein, 18 aa, Homo sapiens
IAIIGAGIGGTSAAYYLR

SEQ ID NO: 4254 - protein, 9 aa, Homo sapiens
IFSQETLTK

SEQ ID NO: 4255 - protein, 9 aa, Homo sapiens
IFSQETLTK

SEQ ID NO: 4256 - protein, 9 aa, Homo sapiens
IFSQETLTK

SEQ ID NO: 4257 - protein, 9 aa, Homo sapiens
IFSQETLTK

SEQ ID NO: 4258 - protein, 8 aa, Homo sapiens
TLLETLQK

SEQ ID NO: 4259 - protein, 8 aa, Homo sapiens
TLLETLQK

SEQ ID NO: 4260 - protein, 8 aa, Homo sapiens
TLLETLQK

SEQ ID NO: 4261 - protein, 8 aa, Homo sapiens
TLLETLQK

SEQ ID NO: 4262 - protein, 13 aa, Homo sapiens
YQSHDYAFSSVEK

SEQ ID NO: 4263 - protein, 13 aa, Homo sapiens
YQSHDYAFSSVEK

SEQ ID NO: 4264 - protein, 13 aa, Homo sapiens
YQSHDYAFSSVEK

SEQ ID NO: 4265 - protein, 13 aa, Homo sapiens
YQSHDYAFSSVEK

SEQ ID NO: 4266 - protein, 8 aa, Homo sapiens
AHGVHATK

SEQ ID NO: 4267 - protein, 8 aa, Homo sapiens
AHGVHATK

SEQ ID NO: 4268 - protein, 8 aa, Homo sapiens
AHGVHATK

SEQ ID NO: 4269 - protein, 8 aa, Homo sapiens
AHGVHATK

SEQ ID NO: 4270 - protein, 8 aa, Homo sapiens
EEDTGRPR

SEQ ID NO: 4271 - protein, 18 aa, Homo sapiens
LLEIDSVGSEDSLDTSLR

SEQ ID NO: 4272 - protein, 18 aa, Homo sapiens
LLEIDSVGSEDSLDTSLR

SEQ ID NO: 4273 - protein, 18 aa, Homo sapiens
LLEIDSVGSEDSLDTSLR

SEQ ID NO: 4274 - protein, 18 aa, Homo sapiens
LLEIDSVGSEDSLDTSLR

SEQ ID NO: 4275 - protein, 7 aa, Homo sapiens
SQIHSIR

SEQ ID NO: 4276 - protein, 7 aa, Homo sapiens
SQIHSIR

SEQ ID NO: 4277 - protein, 7 aa, Homo sapiens
SQIHSIR

SEQ ID NO: 4278 - protein, 7 aa, Homo sapiens
SQIHSIR

SEQ ID NO: 4279 - protein, 8 aa, Homo sapiens
TVIYEIPR

SEQ ID NO: 4280 - protein, 8 aa, Homo sapiens
TVIYEIPR

SEQ ID NO: 4281 - protein, 8 aa, Homo sapiens
TVIYEIPR

SEQ ID NO: 4282 - protein, 8 aa, Homo sapiens
TVIYEIPR

SEQ ID NO: 4283 - protein, 7 aa, Homo sapiens
SFDDLQR

SEQ ID NO: 4284 - protein, 7 aa, Homo sapiens
SFDDLQR

SEQ ID NO: 4285 - protein, 7 aa, Homo sapiens
SFDDLQR

SEQ ID NO: 4286 - protein, 7 aa, Homo sapiens
SFDDLQR

SEQ ID NO: 4287 - protein, 12 aa, Homo sapiens
SHSGGELESLAR

SEQ ID NO: 4288 - protein, 12 aa, Homo sapiens
SHSGGELESLAR

SEQ ID NO: 4289 - protein, 12 aa, Homo sapiens
SHSGGELESLAR

SEQ ID NO: 4290 - protein, 12 aa, Homo sapiens
SHSGGELESLAR

SEQ ID NO: 4291 - protein, 9 aa, Homo sapiens
SPGGSQEQR

SEQ ID NO: 4292 - protein, 9 aa, Homo sapiens
SPGGSQEQR

SEQ ID NO: 4293 - protein, 9 aa, Homo sapiens
SPGGSQEQR

SEQ ID NO: 4294 - protein, 9 aa, Homo sapiens
SPGGSQEQR

SEQ ID NO: 4295 - protein, 12 aa, Homo sapiens
DTSATPQSASIK

SEQ ID NO: 4296 - protein, 12 aa, Homo sapiens
DTSATPQSASIK

SEQ ID NO: 4297 - protein, 12 aa, Homo sapiens
DTSATPQSASIK

SEQ ID NO: 4298 - protein, 12 aa, Homo sapiens
DTSATPQSASIK

SEQ ID NO: 4299 - protein, 9 aa, Homo sapiens
GNGYVQSPR

SEQ ID NO: 4300 - protein, 9 aa, Homo sapiens
LANVVFFPR

SEQ ID NO: 4301 - protein, 9 aa, Homo sapiens
LANVVFFPR

SEQ ID NO: 4302 - protein, 9 aa, Homo sapiens
LANVVFFPR

SEQ ID NO: 4303 - protein, 9 aa, Homo sapiens
LANVVFFPR

SEQ ID NO: 4304 - protein, 12 aa, Homo sapiens
SDDYFVAKPGFK

SEQ ID NO: 4305 - protein, 12 aa, Homo sapiens
SDDYFVAKPGFK

SEQ ID NO: 4306 - protein, 12 aa, Homo sapiens
SDDYFVAKPGFK

SEQ ID NO: 4307 - protein, 12 aa, Homo sapiens
SDDYFVAKPGFK

SEQ ID NO: 4308 - protein, 17 aa, Homo sapiens
YDFVEVEDISETSTIIR

SEQ ID NO: 4309 - protein, 8 aa, Homo sapiens
DPNIVIAK

SEQ ID NO: 4310 - protein, 8 aa, Homo sapiens
DPNIVIAK

SEQ ID NO: 4311 - protein, 8 aa, Homo sapiens
DPNIVIAK

SEQ ID NO: 4312 - protein, 8 aa, Homo sapiens
DPNIVIAK

SEQ ID NO: 4313 - protein, 11 aa, Homo sapiens
ELSDFISYLQR

SEQ ID NO: 4314 - protein, 11 aa, Homo sapiens
ELSDFISYLQR

SEQ ID NO: 4315 - protein, 11 aa, Homo sapiens
ELSDFISYLQR

SEQ ID NO: 4316 - protein, 11 aa, Homo sapiens
ELSDFISYLQR

SEQ ID NO: 4317 - protein, 31 aa, Homo sapiens
FAHTNVESLVNEYDDNGEGIILFRPSHLTNK

SEQ ID NO: 4318 - protein, 13 aa, Homo sapiens
SEPIPESNDGPVK

SEQ ID NO: 4319 - protein, 13 aa, Homo sapiens
SEPIPESNDGPVK

SEQ ID NO: 4320 - protein, 13 aa, Homo sapiens
SEPIPESNDGPVK

SEQ ID NO: 4321 - protein, 13 aa, Homo sapiens
SEPIPESNDGPVK

SEQ ID NO: 4322 - protein, 8 aa, Homo sapiens
TVAYTEQK

SEQ ID NO: 4323 - protein, 8 aa, Homo sapiens
TVAYTEQK

SEQ ID NO: 4324 - protein, 8 aa, Homo sapiens
TVAYTEQK

SEQ ID NO: 4325 - protein, 8 aa, Homo sapiens
TVAYTEQK

SEQ ID NO: 4326 - protein, 20 aa, Homo sapiens
EENGVLVLNDANFDNFVADK

SEQ ID NO: 4327 - protein, 19 aa, Homo sapiens
EVSQPDWTPPPEVTLVLTK

SEQ ID NO: 4328 - protein, 10 aa, Homo sapiens
FDVSGYPTIK

SEQ ID NO: 4329 - protein, 10 aa, Homo sapiens
FDVSGYPTIK

SEQ ID NO: 4330 - protein, 10 aa, Homo sapiens
FDVSGYPTIK

SEQ ID NO: 4331 - protein, 10 aa, Homo sapiens
FDVSGYPTIK

SEQ ID NO: 4332 - protein, 11 aa, Homo sapiens
FHHTFSTEIAK

SEQ ID NO: 4333 - protein, 11 aa, Homo sapiens
FHHTFSTEIAK

SEQ ID NO: 4334 - protein, 11 aa, Homo sapiens
FHHTFSTEIAK

SEQ ID NO: 4335 - protein, 11 aa, Homo sapiens
FHHTFSTEIAK

SEQ ID NO: 4336 - protein, 8 aa, Homo sapiens
FIEEHATK

SEQ ID NO: 4337 - protein, 8 aa, Homo sapiens
FIEEHATK

SEQ ID NO: 4338 - protein, 8 aa, Homo sapiens
FIEEHATK

SEQ ID NO: 4339 - protein, 8 aa, Homo sapiens
FIEEHATK

SEQ ID NO: 4340 - protein, 11 aa, Homo sapiens
GESPVDYDGGR

SEQ ID NO: 4341 - protein, 11 aa, Homo sapiens
GESPVDYDGGR

SEQ ID NO: 4342 - protein, 11 aa, Homo sapiens
GESPVDYDGGR

SEQ ID NO: 4343 - protein, 11 aa, Homo sapiens
GESPVDYDGGR

SEQ ID NO: 4344 - protein, 17 aa, Homo sapiens
HHSLGGQYGVQGFPTIK

SEQ ID NO: 4345 - protein, 17 aa, Homo sapiens
HHSLGGQYGVQGFPTIK

SEQ ID NO: 4346 - protein, 17 aa, Homo sapiens
HHSLGGQYGVQGFPTIK

SEQ ID NO: 4347 - protein, 17 aa, Homo sapiens
HHSLGGQYGVQGFPTIK

SEQ ID NO: 4348 - protein, 14 aa, Homo sapiens
NLEPEWAAAASEVK

SEQ ID NO: 4349 - protein, 14 aa, Homo sapiens
NLEPEWAAAASEVK

SEQ ID NO: 4350 - protein, 14 aa, Homo sapiens
NLEPEWAAAASEVK

SEQ ID NO: 4351 - protein, 14 aa, Homo sapiens
NLEPEWAAAASEVK

SEQ ID NO: 4352 - protein, 10 aa, Homo sapiens
NRPEDYQGGR

SEQ ID NO: 4353 - protein, 10 aa, Homo sapiens
NRPEDYQGGR

SEQ ID NO: 4354 - protein, 10 aa, Homo sapiens
NRPEDYQGGR

SEQ ID NO: 4355 - protein, 10 aa, Homo sapiens
NRPEDYQGGR

SEQ ID NO: 4356 - protein, 9 aa, Homo sapiens
NSYLEVLLK

SEQ ID NO: 4357 - protein, 9 aa, Homo sapiens
NSYLEVLLK

SEQ ID NO: 4358 - protein, 9 aa, Homo sapiens
NSYLEVLLK

SEQ ID NO: 4359 - protein, 9 aa, Homo sapiens
NSYLEVLLK

SEQ ID NO: 4360 - protein, 16 aa, Homo sapiens
DQNFVILEFPVEEQDR

SEQ ID NO: 4361 - protein, 16 aa, Homo sapiens
DQNFVILEFPVEEQDR

SEQ ID NO: 4362 - protein, 16 aa, Homo sapiens
DQNFVILEFPVEEQDR

SEQ ID NO: 4363 - protein, 16 aa, Homo sapiens
DQNFVILEFPVEEQDR

SEQ ID NO: 4364 - protein, 13 aa, Homo sapiens
EDTIVSQTQDFTK

SEQ ID NO: 4365 - protein, 13 aa, Homo sapiens
EDTIVSQTQDFTK

SEQ ID NO: 4366 - protein, 13 aa, Homo sapiens
EDTIVSQTQDFTK

SEQ ID NO: 4367 - protein, 13 aa, Homo sapiens
EDTIVSQTQDFTK

SEQ ID NO: 4368 - protein, 14 aa, Homo sapiens
SELVTVTESFSTPK

SEQ ID NO: 4369 - protein, 14 aa, Homo sapiens
SELVTVTESFSTPK

SEQ ID NO: 4370 - protein, 14 aa, Homo sapiens
SELVTVTESFSTPK

SEQ ID NO: 4371 - protein, 14 aa, Homo sapiens
SELVTVTESFSTPK

SEQ ID NO: 4372 - protein, 11 aa, Homo sapiens
STESYFIPEVR

SEQ ID NO: 4373 - protein, 11 aa, Homo sapiens
STESYFIPEVR

SEQ ID NO: 4374 - protein, 11 aa, Homo sapiens
STESYFIPEVR

SEQ ID NO: 4375 - protein, 11 aa, Homo sapiens
STESYFIPEVR

SEQ ID NO: 4376 - protein, 16 aa, Homo sapiens
VIAPVDEVQISILSSK

SEQ ID NO: 4377 - protein, 16 aa, Homo sapiens
VIAPVDEVQISILSSK

SEQ ID NO: 4378 - protein, 16 aa, Homo sapiens
VIAPVDEVQISILSSK

SEQ ID NO: 4379 - protein, 16 aa, Homo sapiens
VIAPVDEVQISILSSK

SEQ ID NO: 4380 - protein, 12 aa, Homo sapiens
DTDTGALLFIGK

SEQ ID NO: 4381 - protein, 12 aa, Homo sapiens
DTDTGALLFIGK

SEQ ID NO: 4382 - protein, 12 aa, Homo sapiens
DTDTGALLFIGK

SEQ ID NO: 4383 - protein, 12 aa, Homo sapiens
DTDTGALLFIGK

SEQ ID NO: 4384 - protein, 11 aa, Homo sapiens
ELLDTVTAPQK

SEQ ID NO: 4385 - protein, 11 aa, Homo sapiens
ELLDTVTAPQK

SEQ ID NO: 4386 - protein, 11 aa, Homo sapiens
ELLDTVTAPQK

SEQ ID NO: 4387 - protein, 11 aa, Homo sapiens
ELLDTVTAPQK

SEQ ID NO: 4388 - protein, 12 aa, Homo sapiens
LQSLFDSPDFSK

SEQ ID NO: 4389 - protein, 12 aa, Homo sapiens
LQSLFDSPDFSK

SEQ ID NO: 4390 - protein, 12 aa, Homo sapiens
LQSLFDSPDFSK

SEQ ID NO: 4391 - protein, 12 aa, Homo sapiens
LQSLFDSPDFSK

SEQ ID NO: 4392 - protein, 9 aa, Homo sapiens
LSYEGEVTK

SEQ ID NO: 4393 - protein, 9 aa, Homo sapiens
LSYEGEVTK

SEQ ID NO: 4394 - protein, 9 aa, Homo sapiens
LSYEGEVTK

SEQ ID NO: 4395 - protein, 9 aa, Homo sapiens
LSYEGEVTK

SEQ ID NO: 4396 - protein, 10 aa, Homo sapiens
TVQAVLTVPK

SEQ ID NO: 4397 - protein, 10 aa, Homo sapiens
TVQAVLTVPK

SEQ ID NO: 4398 - protein, 10 aa, Homo sapiens
TVQAVLTVPK

SEQ ID NO: 4399 - protein, 10 aa, Homo sapiens
TVQAVLTVPK

SEQ ID NO: 4400 - protein, 8 aa, Homo sapiens
AVSNEIVR

SEQ ID NO: 4401 - protein, 8 aa, Homo sapiens
AVSNEIVR

SEQ ID NO: 4402 - protein, 8 aa, Homo sapiens
AVSNEIVR

SEQ ID NO: 4403 - protein, 8 aa, Homo sapiens
AVSNEIVR

SEQ ID NO: 4404 - protein, 12 aa, Homo sapiens
FPTDQLTPDQER

SEQ ID NO: 4405 - protein, 12 aa, Homo sapiens
FPTDQLTPDQER

SEQ ID NO: 4406 - protein, 12 aa, Homo sapiens
FPTDQLTPDQER

SEQ ID NO: 4407 - protein, 12 aa, Homo sapiens
FPTDQLTPDQER

SEQ ID NO: 4408 - protein, 10 aa, Homo sapiens
IANVFTNAFR

SEQ ID NO: 4409 - protein, 10 aa, Homo sapiens
IANVFTNAFR

SEQ ID NO: 4410 - protein, 10 aa, Homo sapiens
IANVFTNAFR

SEQ ID NO: 4411 - protein, 10 aa, Homo sapiens
IANVFTNAFR

SEQ ID NO: 4412 - protein, 7 aa, Homo sapiens
VFFASWR

SEQ ID NO: 4413 - protein, 7 aa, Homo sapiens
VFFASWR

SEQ ID NO: 4414 - protein, 7 aa, Homo sapiens
VFFASWR

SEQ ID NO: 4415 - protein, 7 aa, Homo sapiens
VFFASWR

SEQ ID NO: 4416 - protein, 12 aa, Homo sapiens
VVLEGGIDPILR

SEQ ID NO: 4417 - protein, 12 aa, Homo sapiens
VVLEGGIDPILR

SEQ ID NO: 4418 - protein, 12 aa, Homo sapiens
VVLEGGIDPILR

SEQ ID NO: 4419 - protein, 12 aa, Homo sapiens
VVLEGGIDPILR

SEQ ID NO: 4420 - protein, 22 aa, Homo sapiens
LSLPLLLLLLGAWAIPGGLGDR

SEQ ID NO: 4421 - protein, 22 aa, Homo sapiens
LSLPLLLLLLGAWAIPGGLGDR

SEQ ID NO: 4422 - protein, 22 aa, Homo sapiens
LSLPLLLLLLGAWAIPGGLGDR

SEQ ID NO: 4423 - protein, 22 aa, Homo sapiens
LSLPLLLLLLGAWAIPGGLGDR

SEQ ID NO: 4424 - protein, 8 aa, Homo sapiens
NWQDYGVR

SEQ ID NO: 4425 - protein, 8 aa, Homo sapiens
NWQDYGVR

SEQ ID NO: 4426 - protein, 8 aa, Homo sapiens
NWQDYGVR

SEQ ID NO: 4427 - protein, 8 aa, Homo sapiens
NWQDYGVR

SEQ ID NO: 4428 - protein, 14 aa, Homo sapiens
ALPFWNEEIVPQIK

SEQ ID NO: 4429 - protein, 14 aa, Homo sapiens
ALPFWNEEIVPQIK

SEQ ID NO: 4430 - protein, 14 aa, Homo sapiens
ALPFWNEEIVPQIK

SEQ ID NO: 4431 - protein, 14 aa, Homo sapiens
ALPFWNEEIVPQIK

SEQ ID NO: 4432 - protein, 10 aa, Homo sapiens
AMEAVAAQGK

SEQ ID NO: 4433 - protein, 10 aa, Homo sapiens
AMEAVAAQGK

SEQ ID NO: 4434 - protein, 10 aa, Homo sapiens
AMEAVAAQGK

SEQ ID NO: 4435 - protein, 10 aa, Homo sapiens
AMEAVAAQGK

SEQ ID NO: 4436 - protein, 18 aa, Homo sapiens
FSGWYDADLSPAGHEEAK

SEQ ID NO: 4437 - protein, 18 aa, Homo sapiens
FSGWYDADLSPAGHEEAK

SEQ ID NO: 4438 - protein, 18 aa, Homo sapiens
FSGWYDADLSPAGHEEAK

SEQ ID NO: 4439 - protein, 18 aa, Homo sapiens
FSGWYDADLSPAGHEEAK

SEQ ID NO: 4440 - protein, 18 aa, Homo sapiens
FSGWYDADLSPAGHEEAK

SEQ ID NO: 4441 - protein, 18 aa, Homo sapiens
FSGWYDADLSPAGHEEAK

SEQ ID NO: 4442 - protein, 18 aa, Homo sapiens
FSGWYDADLSPAGHEEAK

SEQ ID NO: 4443 - protein, 11 aa, Homo sapiens
HGESAWNLENR

SEQ ID NO: 4444 - protein, 11 aa, Homo sapiens
HGESAWNLENR

SEQ ID NO: 4445 - protein, 11 aa, Homo sapiens
HGESAWNLENR

SEQ ID NO: 4446 - protein, 11 aa, Homo sapiens
HGESAWNLENR

SEQ ID NO: 4447 - protein, 18 aa, Homo sapiens
NLKPIKPMQFLGDEETVR

SEQ ID NO: 4448 - protein, 18 aa, Homo sapiens
NLKPIKPMQFLGDEETVR

SEQ ID NO: 4449 - protein, 18 aa, Homo sapiens
NLKPIKPMQFLGDEETVR

SEQ ID NO: 4450 - protein, 18 aa, Homo sapiens
NLKPIKPMQFLGDEETVR

SEQ ID NO: 4451 - protein, 13 aa, Homo sapiens
IHTYVYEFIYLVR

SEQ ID NO: 4452 - protein, 27 aa, Homo sapiens
LDPSPFIADFQTTAEELGLLSSSPNLL

SEQ ID NO: 4453 - protein, 18 aa, Homo sapiens
VVSEETLLFQTELYFTPR

SEQ ID NO: 4454 - protein, 11 aa, Homo sapiens
DAVTTTVTGAK

SEQ ID NO: 4455 - protein, 11 aa, Homo sapiens
DAVTTTVTGAK

SEQ ID NO: 4456 - protein, 11 aa, Homo sapiens
DAVTTTVTGAK

SEQ ID NO: 4457 - protein, 11 aa, Homo sapiens
DAVTTTVTGAK

SEQ ID NO: 4458 - protein, 11 aa, Homo sapiens
EVSDSLLTSSK

SEQ ID NO: 4459 - protein, 11 aa, Homo sapiens
EVSDSLLTSSK

SEQ ID NO: 4460 - protein, 11 aa, Homo sapiens
EVSDSLLTSSK

SEQ ID NO: 4461 - protein, 11 aa, Homo sapiens
EVSDSLLTSSK

SEQ ID NO: 4462 - protein, 16 aa, Homo sapiens
LPILNQPSTQIVANAK

SEQ ID NO: 4463 - protein, 16 aa, Homo sapiens
LPILNQPSTQIVANAK

SEQ ID NO: 4464 - protein, 16 aa, Homo sapiens
LPILNQPSTQIVANAK

SEQ ID NO: 4465 - protein, 16 aa, Homo sapiens
LPILNQPSTQIVANAK

SEQ ID NO: 4466 - protein, 18 aa, Homo sapiens
SELLVEQYLPLTEEELEK

SEQ ID NO: 4467 - protein, 18 aa, Homo sapiens
SELLVEQYLPLTEEELEK

SEQ ID NO: 4468 - protein, 18 aa, Homo sapiens
SELLVEQYLPLTEEELEK

SEQ ID NO: 4469 - protein, 18 aa, Homo sapiens
SELLVEQYLPLTEEELEK

SEQ ID NO: 4470 - protein, 14 aa, Homo sapiens
SVVSGSINTVLGSR

SEQ ID NO: 4471 - protein, 14 aa, Homo sapiens
SVVSGSINTVLGSR

SEQ ID NO: 4472 - protein, 14 aa, Homo sapiens
SVVSGSINTVLGSR

SEQ ID NO: 4473 - protein, 14 aa, Homo sapiens
SVVSGSINTVLGSR

SEQ ID NO: 4474 - protein, 15 aa, Homo sapiens
DTVATQLSEAVDATR

SEQ ID NO: 4475 - protein, 15 aa, Homo sapiens
DTVATQLSEAVDATR

SEQ ID NO: 4476 - protein, 15 aa, Homo sapiens
DTVATQLSEAVDATR

SEQ ID NO: 4477 - protein, 15 aa, Homo sapiens
DTVATQLSEAVDATR

SEQ ID NO: 4478 - protein, 17 aa, Homo sapiens
IATSLDGFDVASVQQQR

SEQ ID NO: 4479 - protein, 17 aa, Homo sapiens
IATSLDGFDVASVQQQR

SEQ ID NO: 4480 - protein, 17 aa, Homo sapiens
IATSLDGFDVASVQQQR

SEQ ID NO: 4481 - protein, 17 aa, Homo sapiens
IATSLDGFDVASVQQQR

SEQ ID NO: 4482 - protein, 14 aa, Homo sapiens
LEENLPILQQPTEK

SEQ ID NO: 4483 - protein, 14 aa, Homo sapiens
LEENLPILQQPTEK

SEQ ID NO: 4484 - protein, 14 aa, Homo sapiens
LEENLPILQQPTEK

SEQ ID NO: 4485 - protein, 14 aa, Homo sapiens
LEENLPILQQPTEK

SEQ ID NO: 4486 - protein, 18 aa, Homo sapiens
SEEWADNHLPLTDAELAR

SEQ ID NO: 4487 - protein, 18 aa, Homo sapiens
SEEWADNHLPLTDAELAR

SEQ ID NO: 4488 - protein, 18 aa, Homo sapiens
SEEWADNHLPLTDAELAR

SEQ ID NO: 4489 - protein, 18 aa, Homo sapiens
SEEWADNHLPLTDAELAR

SEQ ID NO: 4490 - protein, 16 aa, Homo sapiens
TLTAAAVSGAQPILSK

SEQ ID NO: 4491 - protein, 16 aa, Homo sapiens
TLTAAAVSGAQPILSK

SEQ ID NO: 4492 - protein, 16 aa, Homo sapiens
TLTAAAVSGAQPILSK

SEQ ID NO: 4493 - protein, 16 aa, Homo sapiens
TLTAAAVSGAQPILSK

SEQ ID NO: 4494 - protein, 18 aa, Homo sapiens
AQVEEFLAQHGSEYQSVK

SEQ ID NO: 4495 - protein, 18 aa, Homo sapiens
AQVEEFLAQHGSEYQSVK

SEQ ID NO: 4496 - protein, 18 aa, Homo sapiens
AQVEEFLAQHGSEYQSVK

SEQ ID NO: 4497 - protein, 18 aa, Homo sapiens
AQVEEFLAQHGSEYQSVK

SEQ ID NO: 4498 - protein, 15 aa, Homo sapiens
IFQNLDGALDEVVLK

SEQ ID NO: 4499 - protein, 15 aa, Homo sapiens
IFQNLDGALDEVVLK

SEQ ID NO: 4500 - protein, 15 aa, Homo sapiens
IFQNLDGALDEVVLK

SEQ ID NO: 4501 - protein, 15 aa, Homo sapiens
IFQNLDGALDEVVLK

SEQ ID NO: 4502 - protein, 12 aa, Homo sapiens
LQLNYLGNYIPR

SEQ ID NO: 4503 - protein, 12 aa, Homo sapiens
LTHYHEGLPTTR

SEQ ID NO: 4504 - protein, 12 aa, Homo sapiens
LTHYHEGLPTTR

SEQ ID NO: 4505 - protein, 12 aa, Homo sapiens
LTHYHEGLPTTR

SEQ ID NO: 4506 - protein, 12 aa, Homo sapiens
LTHYHEGLPTTR

SEQ ID NO: 4507 - protein, 18 aa, Homo sapiens
NLAYDTLPVLIHGNGPTK

SEQ ID NO: 4508 - protein, 18 aa, Homo sapiens
NLAYDTLPVLIHGNGPTK

SEQ ID NO: 4509 - protein, 18 aa, Homo sapiens
NLAYDTLPVLIHGNGPTK

SEQ ID NO: 4510 - protein, 18 aa, Homo sapiens
NLAYDTLPVLIHGNGPTK

SEQ ID NO: 4511 - protein, 14 aa, Homo sapiens
IVGPEENLSQAEAR

SEQ ID NO: 4512 - protein, 14 aa, Homo sapiens
IVGPEENLSQAEAR

SEQ ID NO: 4513 - protein, 14 aa, Homo sapiens
IVGPEENLSQAEAR

SEQ ID NO: 4514 - protein, 14 aa, Homo sapiens
IVGPEENLSQAEAR

SEQ ID NO: 4515 - protein, 19 aa, Homo sapiens
IVQQWNLQDNDDDQLFYTK

SEQ ID NO: 4516 - protein, 11 aa, Homo sapiens
LTHLHEGLPVK

SEQ ID NO: 4517 - protein, 11 aa, Homo sapiens
LTHLHEGLPVK

SEQ ID NO: 4518 - protein, 11 aa, Homo sapiens
LTHLHEGLPVK

SEQ ID NO: 4519 - protein, 11 aa, Homo sapiens
LTHLHEGLPVK

SEQ ID NO: 4520 - protein, 17 aa, Homo sapiens
LWSNFWGALSPDGYYAR

SEQ ID NO: 4521 - protein, 17 aa, Homo sapiens
LWSNFWGALSPDGYYAR

SEQ ID NO: 4522 - protein, 17 aa, Homo sapiens
LWSNFWGALSPDGYYAR

SEQ ID NO: 4523 - protein, 17 aa, Homo sapiens
LWSNFWGALSPDGYYAR

SEQ ID NO: 4524 - protein, 12 aa, Homo sapiens
SEDYVDIVQGNR

SEQ ID NO: 4525 - protein, 12 aa, Homo sapiens
SEDYVDIVQGNR

SEQ ID NO: 4526 - protein, 12 aa, Homo sapiens
SEDYVDIVQGNR

SEQ ID NO: 4527 - protein, 12 aa, Homo sapiens
SEDYVDIVQGNR

SEQ ID NO: 4528 - protein, 9 aa, Homo sapiens
IGNFSTDIK

SEQ ID NO: 4529 - protein, 9 aa, Homo sapiens
IGNFSTDIK

SEQ ID NO: 4530 - protein, 9 aa, Homo sapiens
IGNFSTDIK

SEQ ID NO: 4531 - protein, 9 aa, Homo sapiens
IGNFSTDIK

SEQ ID NO: 4532 - protein, 8 aa, Homo sapiens
ISFDEFIK

SEQ ID NO: 4533 - protein, 8 aa, Homo sapiens
ISFDEFIK

SEQ ID NO: 4534 - protein, 8 aa, Homo sapiens
ISFDEFIK

SEQ ID NO: 4535 - protein, 8 aa, Homo sapiens
ISFDEFIK

SEQ ID NO: 4536 - protein, 19 aa, Homo sapiens
VDTDGNGYISFNELNDLFK

SEQ ID NO: 4537 - protein, 19 aa, Homo sapiens
VDTDGNGYISFNELNDLFK

SEQ ID NO: 4538 - protein, 19 aa, Homo sapiens
VDTDGNGYISFNELNDLFK

SEQ ID NO: 4539 - protein, 19 aa, Homo sapiens
VDTDGNGYISFNELNDLFK

SEQ ID NO: 4540 - protein, 7 aa, Homo sapiens
VPVDWNR

SEQ ID NO: 4541 - protein, 22 aa, Homo sapiens
YPALHKPENQDIDWGALEGETR

SEQ ID NO: 4542 - protein, 22 aa, Homo sapiens
YPALHKPENQDIDWGALEGETR

SEQ ID NO: 4543 - protein, 22 aa, Homo sapiens
YPALHKPENQDIDWGALEGETR

SEQ ID NO: 4544 - protein, 22 aa, Homo sapiens
YPALHKPENQDIDWGALEGETR

SEQ ID NO: 4545 - protein, 11 aa, Homo sapiens
LDITAEILAVR

SEQ ID NO: 4546 - protein, 11 aa, Homo sapiens
LDITAEILAVR

SEQ ID NO: 4547 - protein, 11 aa, Homo sapiens
LDITAEILAVR

SEQ ID NO: 4548 - protein, 11 aa, Homo sapiens
LDITAEILAVR

SEQ ID NO: 4549 - protein, 14 aa, Homo sapiens
LQVNTPLVGASLLR

SEQ ID NO: 4550 - protein, 14 aa, Homo sapiens
LQVNTPLVGASLLR

SEQ ID NO: 4551 - protein, 14 aa, Homo sapiens
LQVNTPLVGASLLR

SEQ ID NO: 4552 - protein, 14 aa, Homo sapiens
LQVNTPLVGASLLR

SEQ ID NO: 4553 - protein, 10 aa, Homo sapiens
LYVTIPLGIK

SEQ ID NO: 4554 - protein, 10 aa, Homo sapiens
LYVTIPLGIK

SEQ ID NO: 4555 - protein, 10 aa, Homo sapiens
LYVTIPLGIK

SEQ ID NO: 4556 - protein, 10 aa, Homo sapiens
LYVTIPLGIK

SEQ ID NO: 4557 - protein, 19 aa, Homo sapiens
VTDPQLLELGLVQSPDGHR

SEQ ID NO: 4558 - protein, 19 aa, Homo sapiens
VTDPQLLELGLVQSPDGHR

SEQ ID NO: 4559 - protein, 19 aa, Homo sapiens
VTDPQLLELGLVQSPDGHR

SEQ ID NO: 4560 - protein, 19 aa, Homo sapiens
VTDPQLLELGLVQSPDGHR

SEQ ID NO: 4561 - protein, 15 aa, Homo sapiens
VTSVIPGLNNIIDIK

SEQ ID NO: 4562 - protein, 15 aa, Homo sapiens
VTSVIPGLNNIIDIK

SEQ ID NO: 4563 - protein, 15 aa, Homo sapiens
VTSVIPGLNNIIDIK

SEQ ID NO: 4564 - protein, 15 aa, Homo sapiens
VTSVIPGLNNIIDIK

SEQ ID NO: 4565 - protein, 15 aa, Homo sapiens
ELPVPIYVTQGEAQR

SEQ ID NO: 4566 - protein, 15 aa, Homo sapiens
ELPVPIYVTQGEAQR

SEQ ID NO: 4567 - protein, 15 aa, Homo sapiens
ELPVPIYVTQGEAQR

SEQ ID NO: 4568 - protein, 15 aa, Homo sapiens
ELPVPIYVTQGEAQR

SEQ ID NO: 4569 - protein, 17 aa, Homo sapiens
GPSGAEEATVEYGVTSR

SEQ ID NO: 4570 - protein, 17 aa, Homo sapiens
GPSGAEEATVEYGVTSR

SEQ ID NO: 4571 - protein, 17 aa, Homo sapiens
GPSGAEEATVEYGVTSR

SEQ ID NO: 4572 - protein, 17 aa, Homo sapiens
GPSGAEEATVEYGVTSR

SEQ ID NO: 4573 - protein, 9 aa, Homo sapiens
GPVDAVTGK

SEQ ID NO: 4574 - protein, 9 aa, Homo sapiens
GPVDAVTGK

SEQ ID NO: 4575 - protein, 9 aa, Homo sapiens
GPVDAVTGK

SEQ ID NO: 4576 - protein, 9 aa, Homo sapiens
GPVDAVTGK

SEQ ID NO: 4577 - protein, 15 aa, Homo sapiens
QLAGSQPFSSEGLGR

SEQ ID NO: 4578 - protein, 24 aa, Homo sapiens
SQPPGISSQHFTYQDPVLLSLSPR

SEQ ID NO: 4579 - protein, 24 aa, Homo sapiens
SQPPGISSQHFTYQDPVLLSLSPR

SEQ ID NO: 4580 - protein, 24 aa, Homo sapiens
SQPPGISSQHFTYQDPVLLSLSPR

SEQ ID NO: 4581 - protein, 24 aa, Homo sapiens
SQPPGISSQHFTYQDPVLLSLSPR

SEQ ID NO: 4582 - protein, 7 aa, Homo sapiens
FWVNILK

SEQ ID NO: 4583 - protein, 7 aa, Homo sapiens
FWVNILK

SEQ ID NO: 4584 - protein, 7 aa, Homo sapiens
FWVNILK

SEQ ID NO: 4585 - protein, 7 aa, Homo sapiens
FWVNILK

SEQ ID NO: 4586 - protein, 16 aa, Homo sapiens
LNTIGHYEISNGSTIK

SEQ ID NO: 4587 - protein, 16 aa, Homo sapiens
LNTIGHYEISNGSTIK

SEQ ID NO: 4588 - protein, 16 aa, Homo sapiens
LNTIGHYEISNGSTIK

SEQ ID NO: 4589 - protein, 16 aa, Homo sapiens
LNTIGHYEISNGSTIK

SEQ ID NO: 4590 - protein, 16 aa, Homo sapiens
LNTIGHYEISNGSTIK

SEQ ID NO: 4591 - protein, 16 aa, Homo sapiens
LNTIGHYEISNGSTIK

SEQ ID NO: 4592 - protein, 16 aa, Homo sapiens
LNTIGHYEISNGSTIK

SEQ ID NO: 4593 - protein, 9 aa, Homo sapiens
NPQFVFDIK

SEQ ID NO: 4594 - protein, 9 aa, Homo sapiens
NPQFVFDIK

SEQ ID NO: 4595 - protein, 9 aa, Homo sapiens
NPQFVFDIK

SEQ ID NO: 4596 - protein, 9 aa, Homo sapiens
NPQFVFDIK

SEQ ID NO: 4597 - protein, 11 aa, Homo sapiens
GFEPGVTNILK

SEQ ID NO: 4598 - protein, 11 aa, Homo sapiens
GFEPGVTNILK

SEQ ID NO: 4599 - protein, 11 aa, Homo sapiens
GFEPGVTNILK

SEQ ID NO: 4600 - protein, 11 aa, Homo sapiens
GFEPGVTNILK

SEQ ID NO: 4601 - protein, 12 aa, Homo sapiens
IIDGVPVEITEK

SEQ ID NO: 4602 - protein, 12 aa, Homo sapiens
IIDGVPVEITEK

SEQ ID NO: 4603 - protein, 12 aa, Homo sapiens
IIDGVPVEITEK

SEQ ID NO: 4604 - protein, 12 aa, Homo sapiens
IIDGVPVEITEK

SEQ ID NO: 4605 - protein, 18 aa, Homo sapiens
IIHGNQIATNGVVHVIDR

SEQ ID NO: 4606 - protein, 18 aa, Homo sapiens
IIHGNQIATNGVVHVIDR

SEQ ID NO: 4607 - protein, 18 aa, Homo sapiens
IIHGNQIATNGVVHVIDR

SEQ ID NO: 4608 - protein, 18 aa, Homo sapiens
IIHGNQIATNGVVHVIDR

SEQ ID NO: 4609 - protein, 20 aa, Homo sapiens
LLYPADTPVGNDQLLEILNK

SEQ ID NO: 4610 - protein, 20 aa, Homo sapiens
LLYPADTPVGNDQLLEILNK

SEQ ID NO: 4611 - protein, 20 aa, Homo sapiens
LLYPADTPVGNDQLLEILNK

SEQ ID NO: 4612 - protein, 20 aa, Homo sapiens
LLYPADTPVGNDQLLEILNK

SEQ ID NO: 4613 - protein, 23 aa, Homo sapiens
VLTQIGTSIQDFIEAEDDLSSFR

SEQ ID NO: 4614 - protein, 17 aa, Homo sapiens
DPYQEEEWPQGFGQLTK

SEQ ID NO: 4615 - protein, 17 aa, Homo sapiens
DPYQEEEWPQGFGQLTK

SEQ ID NO: 4616 - protein, 17 aa, Homo sapiens
DPYQEEEWPQGFGQLTK

SEQ ID NO: 4617 - protein, 17 aa, Homo sapiens
DPYQEEEWPQGFGQLTK

SEQ ID NO: 4618 - protein, 11 aa, Homo sapiens
FLFGIYQQAEK

SEQ ID NO: 4619 - protein, 11 aa, Homo sapiens
FLFGIYQQAEK

SEQ ID NO: 4620 - protein, 11 aa, Homo sapiens
FLFGIYQQAEK

SEQ ID NO: 4621 - protein, 11 aa, Homo sapiens
FLFGIYQQAEK

SEQ ID NO: 4622 - protein, 7 aa, Homo sapiens
FVTLLYR

SEQ ID NO: 4623 - protein, 7 aa, Homo sapiens
FVTLLYR

SEQ ID NO: 4624 - protein, 7 aa, Homo sapiens
FVTLLYR

SEQ ID NO: 4625 - protein, 7 aa, Homo sapiens
FVTLLYR

SEQ ID NO: 4626 - protein, 9 aa, Homo sapiens
HVADGEDHA

SEQ ID NO: 4627 - protein, 9 aa, Homo sapiens
HVADGEDHA

SEQ ID NO: 4628 - protein, 9 aa, Homo sapiens
HVADGEDHA

SEQ ID NO: 4629 - protein, 9 aa, Homo sapiens
HVADGEDHA

SEQ ID NO: 4630 - protein, 8 aa, Homo sapiens
LTEPVVPK

SEQ ID NO: 4631 - protein, 8 aa, Homo sapiens
LTEPVVPK

SEQ ID NO: 4632 - protein, 8 aa, Homo sapiens
LTEPVVPK

SEQ ID NO: 4633 - protein, 8 aa, Homo sapiens
LTEPVVPK

SEQ ID NO: 4634 - protein, 14 aa, Homo sapiens
ANEGTVGVSAATER

SEQ ID NO: 4635 - protein, 14 aa, Homo sapiens
ANEGTVGVSAATER

SEQ ID NO: 4636 - protein, 14 aa, Homo sapiens
ANEGTVGVSAATER

SEQ ID NO: 4637 - protein, 14 aa, Homo sapiens
ANEGTVGVSAATER

SEQ ID NO: 4638 - protein, 8 aa, Homo sapiens
DQAQETLK

SEQ ID NO: 4639 - protein, 8 aa, Homo sapiens
DQAQETLK

SEQ ID NO: 4640 - protein, 8 aa, Homo sapiens
DQAQETLK

SEQ ID NO: 4641 - protein, 8 aa, Homo sapiens
DQAQETLK

SEQ ID NO: 4642 - protein, 14 aa, Homo sapiens
HETHGGEDVAVFSK

SEQ ID NO: 4643 - protein, 14 aa, Homo sapiens
HETHGGEDVAVFSK

SEQ ID NO: 4644 - protein, 14 aa, Homo sapiens
HETHGGEDVAVFSK

SEQ ID NO: 4645 - protein, 14 aa, Homo sapiens
HETHGGEDVAVFSK

SEQ ID NO: 4646 - protein, 11 aa, Homo sapiens
LDGLDLVDTWK

SEQ ID NO: 4647 - protein, 11 aa, Homo sapiens
LDGLDLVDTWK

SEQ ID NO: 4648 - protein, 11 aa, Homo sapiens
LDGLDLVDTWK

SEQ ID NO: 4649 - protein, 11 aa, Homo sapiens
LDGLDLVDTWK

SEQ ID NO: 4650 - protein, 10 aa, Homo sapiens
YFLHQSHEER

SEQ ID NO: 4651 - protein, 10 aa, Homo sapiens
YFLHQSHEER

SEQ ID NO: 4652 - protein, 10 aa, Homo sapiens
YFLHQSHEER

SEQ ID NO: 4653 - protein, 10 aa, Homo sapiens
YFLHQSHEER

SEQ ID NO: 4654 - protein, 7 aa, Homo sapiens
FPDENFK

SEQ ID NO: 4655 - protein, 7 aa, Homo sapiens
FPDENFK

SEQ ID NO: 4656 - protein, 7 aa, Homo sapiens
FPDENFK

SEQ ID NO: 4657 - protein, 7 aa, Homo sapiens
FPDENFK

SEQ ID NO: 4658 - protein, 11 aa, Homo sapiens
IEVEKPFAIAK

SEQ ID NO: 4659 - protein, 11 aa, Homo sapiens
IEVEKPFAIAK

SEQ ID NO: 4660 - protein, 11 aa, Homo sapiens
IEVEKPFAIAK

SEQ ID NO: 4661 - protein, 11 aa, Homo sapiens
IEVEKPFAIAK

SEQ ID NO: 4662 - protein, 13 aa, Homo sapiens
TVDNFVALATGEK

SEQ ID NO: 4663 - protein, 13 aa, Homo sapiens
TVDNFVALATGEK

SEQ ID NO: 4664 - protein, 13 aa, Homo sapiens
TVDNFVALATGEK

SEQ ID NO: 4665 - protein, 13 aa, Homo sapiens
TVDNFVALATGEK

SEQ ID NO: 4666 - protein, 8 aa, Homo sapiens
VIFGLFGK

SEQ ID NO: 4667 - protein, 8 aa, Homo sapiens
VIFGLFGK

SEQ ID NO: 4668 - protein, 8 aa, Homo sapiens
VIFGLFGK

SEQ ID NO: 4669 - protein, 8 aa, Homo sapiens
VIFGLFGK

SEQ ID NO: 4670 - protein, 6 aa, Homo sapiens
VYFDLR

SEQ ID NO: 4671 - protein, 6 aa, Homo sapiens
VYFDLR

SEQ ID NO: 4672 - protein, 6 aa, Homo sapiens
VYFDLR

SEQ ID NO: 4673 - protein, 6 aa, Homo sapiens
VYFDLR

SEQ ID NO: 4674 - protein, 8 aa, Homo sapiens
ADEGISFR

SEQ ID NO: 4675 - protein, 8 aa, Homo sapiens
ADEGISFR

SEQ ID NO: 4676 - protein, 8 aa, Homo sapiens
ADEGISFR

SEQ ID NO: 4677 - protein, 8 aa, Homo sapiens
ADEGISFR

SEQ ID NO: 4678 - protein, 11 aa, Homo sapiens
ATAVMPDGQFK

SEQ ID NO: 4679 - protein, 11 aa, Homo sapiens
ATAVMPDGQFK

SEQ ID NO: 4680 - protein, 11 aa, Homo sapiens
ATAVMPDGQFK

SEQ ID NO: 4681 - protein, 11 aa, Homo sapiens
ATAVMPDGQFK

SEQ ID NO: 4682 - protein, 8 aa, Homo sapiens
DISLSDYK

SEQ ID NO: 4683 - protein, 8 aa, Homo sapiens
DISLSDYK

SEQ ID NO: 4684 - protein, 8 aa, Homo sapiens
DISLSDYK

SEQ ID NO: 4685 - protein, 8 aa, Homo sapiens
DISLSDYK

SEQ ID NO: 4686 - protein, 8 aa, Homo sapiens
GLFIIDDK

SEQ ID NO: 4687 - protein, 8 aa, Homo sapiens
GLFIIDDK

SEQ ID NO: 4688 - protein, 8 aa, Homo sapiens
GLFIIDDK

SEQ ID NO: 4689 - protein, 8 aa, Homo sapiens
GLFIIDDK

SEQ ID NO: 4690 - protein, 9 aa, Homo sapiens
IGHPAPNFK

SEQ ID NO: 4691 - protein, 9 aa, Homo sapiens
IGHPAPNFK

SEQ ID NO: 4692 - protein, 9 aa, Homo sapiens
IGHPAPNFK

SEQ ID NO: 4693 - protein, 9 aa, Homo sapiens
IGHPAPNFK

SEQ ID NO: 4694 - protein, 10 aa, Homo sapiens
LVQAFQFTDK

SEQ ID NO: 4695 - protein, 10 aa, Homo sapiens
LVQAFQFTDK

SEQ ID NO: 4696 - protein, 10 aa, Homo sapiens
LVQAFQFTDK

SEQ ID NO: 4697 - protein, 10 aa, Homo sapiens
LVQAFQFTDK

SEQ ID NO: 4698 - protein, 16 aa, Homo sapiens
QGGLGPMNIPLVSDPK

SEQ ID NO: 4699 - protein, 16 aa, Homo sapiens
QGGLGPMNIPLVSDPK

SEQ ID NO: 4700 - protein, 16 aa, Homo sapiens
QGGLGPMNIPLVSDPK

SEQ ID NO: 4701 - protein, 16 aa, Homo sapiens
QGGLGPMNIPLVSDPK

SEQ ID NO: 4702 - protein, 11 aa, Homo sapiens
QITVNDLPVGR

SEQ ID NO: 4703 - protein, 11 aa, Homo sapiens
QITVNDLPVGR

SEQ ID NO: 4704 - protein, 11 aa, Homo sapiens
QITVNDLPVGR

SEQ ID NO: 4705 - protein, 11 aa, Homo sapiens
QITVNDLPVGR

SEQ ID NO: 4706 - protein, 7 aa, Homo sapiens
SVDETLR

SEQ ID NO: 4707 - protein, 7 aa, Homo sapiens
SVDETLR

SEQ ID NO: 4708 - protein, 7 aa, Homo sapiens
SVDETLR

SEQ ID NO: 4709 - protein, 7 aa, Homo sapiens
SVDETLR

SEQ ID NO: 4710 - protein, 10 aa, Homo sapiens
TIAQDYGVLK

SEQ ID NO: 4711 - protein, 10 aa, Homo sapiens
TIAQDYGVLK

SEQ ID NO: 4712 - protein, 10 aa, Homo sapiens
TIAQDYGVLK

SEQ ID NO: 4713 - protein, 10 aa, Homo sapiens
TIAQDYGVLK

SEQ ID NO: 4714 - protein, 14 aa, Homo sapiens
DYGVYLEDSGHTLR

SEQ ID NO: 4715 - protein, 14 aa, Homo sapiens
DYGVYLEDSGHTLR

SEQ ID NO: 4716 - protein, 14 aa, Homo sapiens
DYGVYLEDSGHTLR

SEQ ID NO: 4717 - protein, 14 aa, Homo sapiens
DYGVYLEDSGHTLR

SEQ ID NO: 4718 - protein, 13 aa, Homo sapiens
IPLLSDLTHQISK

SEQ ID NO: 4719 - protein, 13 aa, Homo sapiens
IPLLSDLTHQISK

SEQ ID NO: 4720 - protein, 13 aa, Homo sapiens
IPLLSDLTHQISK

SEQ ID NO: 4721 - protein, 13 aa, Homo sapiens
IPLLSDLTHQISK

SEQ ID NO: 4722 - protein, 19 aa, Homo sapiens
ISKPAPYWEGTAVIDGEFK

SEQ ID NO: 4723 - protein, 19 aa, Homo sapiens
ISKPAPYWEGTAVIDGEFK

SEQ ID NO: 4724 - protein, 19 aa, Homo sapiens
ISKPAPYWEGTAVIDGEFK

SEQ ID NO: 4725 - protein, 19 aa, Homo sapiens
ISKPAPYWEGTAVIDGEFK

SEQ ID NO: 4726 - protein, 11 aa, Homo sapiens
QITLNDLPVGR

SEQ ID NO: 4727 - protein, 11 aa, Homo sapiens
QITLNDLPVGR

SEQ ID NO: 4728 - protein, 11 aa, Homo sapiens
QITLNDLPVGR

SEQ ID NO: 4729 - protein, 11 aa, Homo sapiens
QITLNDLPVGR

SEQ ID NO: 4730 - protein, 12 aa, Homo sapiens
VSVADHSLHLSK

SEQ ID NO: 4731 - protein, 12 aa, Homo sapiens
VSVADHSLHLSK

SEQ ID NO: 4732 - protein, 12 aa, Homo sapiens
VSVADHSLHLSK

SEQ ID NO: 4733 - protein, 12 aa, Homo sapiens
VSVADHSLHLSK

SEQ ID NO: 4734 - protein, 12 aa, Homo sapiens
DSPSVWAAVPGK

SEQ ID NO: 4735 - protein, 12 aa, Homo sapiens
DSPSVWAAVPGK

SEQ ID NO: 4736 - protein, 12 aa, Homo sapiens
DSPSVWAAVPGK

SEQ ID NO: 4737 - protein, 12 aa, Homo sapiens
DSPSVWAAVPGK

SEQ ID NO: 4738 - protein, 14 aa, Homo sapiens
SSFYVNGLTLGGQK

SEQ ID NO: 4739 - protein, 14 aa, Homo sapiens
SSFYVNGLTLGGQK

SEQ ID NO: 4740 - protein, 14 aa, Homo sapiens
SSFYVNGLTLGGQK

SEQ ID NO: 4741 - protein, 14 aa, Homo sapiens
SSFYVNGLTLGGQK

SEQ ID NO: 4742 - protein, 14 aa, Homo sapiens
STGGAPTFNVTVTK

SEQ ID NO: 4743 - protein, 14 aa, Homo sapiens
STGGAPTFNVTVTK

SEQ ID NO: 4744 - protein, 14 aa, Homo sapiens
STGGAPTFNVTVTK

SEQ ID NO: 4745 - protein, 14 aa, Homo sapiens
STGGAPTFNVTVTK

SEQ ID NO: 4746 - protein, 16 aa, Homo sapiens
TFVNITPAEVGVLVGK

SEQ ID NO: 4747 - protein, 16 aa, Homo sapiens
TFVNITPAEVGVLVGK

SEQ ID NO: 4748 - protein, 16 aa, Homo sapiens
TFVNITPAEVGVLVGK

SEQ ID NO: 4749 - protein, 16 aa, Homo sapiens
TFVNITPAEVGVLVGK

SEQ ID NO: 4750 - protein, 7 aa, Homo sapiens
IEEYISK

SEQ ID NO: 4751 - protein, 8 aa, Homo sapiens
IYEYVESR

SEQ ID NO: 4752 - protein, 8 aa, Homo sapiens
IYEYVESR

SEQ ID NO: 4753 - protein, 8 aa, Homo sapiens
IYEYVESR

SEQ ID NO: 4754 - protein, 8 aa, Homo sapiens
IYEYVESR

SEQ ID NO: 4755 - protein, 9 aa, Homo sapiens
QTQVNEATK

SEQ ID NO: 4756 - protein, 9 aa, Homo sapiens
QTQVNEATK

SEQ ID NO: 4757 - protein, 9 aa, Homo sapiens
QTQVNEATK

SEQ ID NO: 4758 - protein, 9 aa, Homo sapiens
QTQVNEATK

SEQ ID NO: 4759 - protein, 11 aa, Homo sapiens
VDSFHESTEGK

SEQ ID NO: 4760 - protein, 11 aa, Homo sapiens
VDSFHESTEGK

SEQ ID NO: 4761 - protein, 11 aa, Homo sapiens
VDSFHESTEGK

SEQ ID NO: 4762 - protein, 11 aa, Homo sapiens
VDSFHESTEGK

SEQ ID NO: 4763 - protein, 21 aa, Homo sapiens
VIVDANNLTVEIENELNIIHK

SEQ ID NO: 4764 - protein, 20 aa, Homo sapiens
AMEVDERPTEQYSDIGGLDK

SEQ ID NO: 4765 - protein, 20 aa, Homo sapiens
AMEVDERPTEQYSDIGGLDK

SEQ ID NO: 4766 - protein, 20 aa, Homo sapiens
AMEVDERPTEQYSDIGGLDK

SEQ ID NO: 4767 - protein, 20 aa, Homo sapiens
AMEVDERPTEQYSDIGGLDK

SEQ ID NO: 4768 - protein, 20 aa, Homo sapiens
AMEVDERPTEQYSDIGGLDK

SEQ ID NO: 4769 - protein, 20 aa, Homo sapiens
AMEVDERPTEQYSDIGGLDK

SEQ ID NO: 4770 - protein, 20 aa, Homo sapiens
AMEVDERPTEQYSDIGGLDK

SEQ ID NO: 4771 - protein, 20 aa, Homo sapiens
AMEVDERPTEQYSDIGGLDK

SEQ ID NO: 4772 - protein, 12 aa, Homo sapiens
GVLMYGPPGTGK

SEQ ID NO: 4773 - protein, 12 aa, Homo sapiens
GVLMYGPPGTGK

SEQ ID NO: 4774 - protein, 12 aa, Homo sapiens
GVLMYGPPGTGK

SEQ ID NO: 4775 - protein, 12 aa, Homo sapiens
GVLMYGPPGTGK

SEQ ID NO: 4776 - protein, 16 aa, Homo sapiens
LAGPQLVQMFIGDGAK

SEQ ID NO: 4777 - protein, 16 aa, Homo sapiens
LAGPQLVQMFIGDGAK

SEQ ID NO: 4778 - protein, 16 aa, Homo sapiens
LAGPQLVQMFIGDGAK

SEQ ID NO: 4779 - protein, 16 aa, Homo sapiens
LAGPQLVQMFIGDGAK

SEQ ID NO: 4780 - protein, 16 aa, Homo sapiens
QIQELVEAIVLPMNHK

SEQ ID NO: 4781 - protein, 16 aa, Homo sapiens
QIQELVEAIVLPMNHK

SEQ ID NO: 4782 - protein, 16 aa, Homo sapiens
QIQELVEAIVLPMNHK

SEQ ID NO: 4783 - protein, 16 aa, Homo sapiens
QIQELVEAIVLPMNHK

SEQ ID NO: 4784 - protein, 16 aa, Homo sapiens
QIQELVEAIVLPMNHK

SEQ ID NO: 4785 - protein, 16 aa, Homo sapiens
QIQELVEAIVLPMNHK

SEQ ID NO: 4786 - protein, 16 aa, Homo sapiens
QIQELVEAIVLPMNHK

SEQ ID NO: 4787 - protein, 16 aa, Homo sapiens
QIQELVEAIVLPMNHK

SEQ ID NO: 4788 - protein, 10 aa, Homo sapiens
VDILDPALLR

SEQ ID NO: 4789 - protein, 10 aa, Homo sapiens
VDILDPALLR

SEQ ID NO: 4790 - protein, 10 aa, Homo sapiens
VDILDPALLR

SEQ ID NO: 4791 - protein, 10 aa, Homo sapiens
VDILDPALLR

SEQ ID NO: 4792 - protein, 10 aa, Homo sapiens
AVGLLTVISK

SEQ ID NO: 4793 - protein, 10 aa, Homo sapiens
AVGLLTVISK

SEQ ID NO: 4794 - protein, 10 aa, Homo sapiens
AVGLLTVISK

SEQ ID NO: 4795 - protein, 10 aa, Homo sapiens
AVGLLTVISK

SEQ ID NO: 4796 - protein, 14 aa, Homo sapiens
AGYLTLYGIEALPR

SEQ ID NO: 4797 - protein, 14 aa, Homo sapiens
AGYLTLYGIEALPR

SEQ ID NO: 4798 - protein, 14 aa, Homo sapiens
AGYLTLYGIEALPR

SEQ ID NO: 4799 - protein, 14 aa, Homo sapiens
AGYLTLYGIEALPR

SEQ ID NO: 4800 - protein, 12 aa, Homo sapiens
DPEIYTDPEVFK

SEQ ID NO: 4801 - protein, 12 aa, Homo sapiens
DPEIYTDPEVFK

SEQ ID NO: 4802 - protein, 12 aa, Homo sapiens
DPEIYTDPEVFK

SEQ ID NO: 4803 - protein, 12 aa, Homo sapiens
DPEIYTDPEVFK

SEQ ID NO: 4804 - protein, 14 aa, Homo sapiens
EVVVDLAMPMADGR

SEQ ID NO: 4805 - protein, 14 aa, Homo sapiens
EVVVDLAMPMADGR

SEQ ID NO: 4806 - protein, 14 aa, Homo sapiens
EVVVDLAMPMADGR

SEQ ID NO: 4807 - protein, 14 aa, Homo sapiens
EVVVDLAMPMADGR

SEQ ID NO: 4808 - protein, 23 aa, Homo sapiens
GELESILWQAEQPVSQTTTLPQK

SEQ ID NO: 4809 - protein, 23 aa, Homo sapiens
GELESILWQAEQPVSQTTTLPQK

SEQ ID NO: 4810 - protein, 23 aa, Homo sapiens
GELESILWQAEQPVSQTTTLPQK

SEQ ID NO: 4811 - protein, 23 aa, Homo sapiens
GELESILWQAEQPVSQTTTLPQK

SEQ ID NO: 4812 - protein, 12 aa, Homo sapiens
HGDIFTILVGGR

SEQ ID NO: 4813 - protein, 12 aa, Homo sapiens
HGDIFTILVGGR

SEQ ID NO: 4814 - protein, 12 aa, Homo sapiens
HGDIFTILVGGR

SEQ ID NO: 4815 - protein, 12 aa, Homo sapiens
HGDIFTILVGGR

SEQ ID NO: 4816 - protein, 15 aa, Homo sapiens
IFDVQLPHYSPSDEK

SEQ ID NO: 4817 - protein, 15 aa, Homo sapiens
IFDVQLPHYSPSDEK

SEQ ID NO: 4818 - protein, 15 aa, Homo sapiens
IFDVQLPHYSPSDEK

SEQ ID NO: 4819 - protein, 15 aa, Homo sapiens
IFDVQLPHYSPSDEK

SEQ ID NO: 4820 - protein, 11 aa, Homo sapiens
LLLFPFLSPQR

SEQ ID NO: 4821 - protein, 11 aa, Homo sapiens
LLLFPFLSPQR

SEQ ID NO: 4822 - protein, 11 aa, Homo sapiens
LLLFPFLSPQR

SEQ ID NO: 4823 - protein, 11 aa, Homo sapiens
LLLFPFLSPQR

SEQ ID NO: 4824 - protein, 11 aa, Homo sapiens
VHSADVFHTFR

SEQ ID NO: 4825 - protein, 17 aa, Homo sapiens
VLDSTPVLDSVLSESLR

SEQ ID NO: 4826 - protein, 17 aa, Homo sapiens
VLDSTPVLDSVLSESLR

SEQ ID NO: 4827 - protein, 17 aa, Homo sapiens
VLDSTPVLDSVLSESLR

SEQ ID NO: 4828 - protein, 17 aa, Homo sapiens
VLDSTPVLDSVLSESLR

SEQ ID NO: 4829 - protein, 15 aa, Homo sapiens
YGFGLMQPEHDVPVR

SEQ ID NO: 4830 - protein, 15 aa, Homo sapiens
YGFGLMQPEHDVPVR

SEQ ID NO: 4831 - protein, 15 aa, Homo sapiens
YGFGLMQPEHDVPVR

SEQ ID NO: 4832 - protein, 15 aa, Homo sapiens
YGFGLMQPEHDVPVR

SEQ ID NO: 4833 - protein, 13 aa, Homo sapiens
FGSLLPIHPVTSG

SEQ ID NO: 4834 - protein, 13 aa, Homo sapiens
FGSLLPIHPVTSG

SEQ ID NO: 4835 - protein, 13 aa, Homo sapiens
FGSLLPIHPVTSG

SEQ ID NO: 4836 - protein, 13 aa, Homo sapiens
FGSLLPIHPVTSG

SEQ ID NO: 4837 - protein, 29 aa, Homo sapiens
LDEEAENLVATVVPTHLAAAVPEVAVYLK

SEQ ID NO: 4838 - protein, 22 aa, Homo sapiens
TGPFAEHSNQLWNISAVPSWSK

SEQ ID NO: 4839 - protein, 22 aa, Homo sapiens
TGPFAEHSNQLWNISAVPSWSK

SEQ ID NO: 4840 - protein, 22 aa, Homo sapiens
TGPFAEHSNQLWNISAVPSWSK

SEQ ID NO: 4841 - protein, 22 aa, Homo sapiens
TGPFAEHSNQLWNISAVPSWSK

SEQ ID NO: 4842 - protein, 10 aa, Homo sapiens
VDDQIAIVFK

SEQ ID NO: 4843 - protein, 10 aa, Homo sapiens
VDDQIAIVFK

SEQ ID NO: 4844 - protein, 10 aa, Homo sapiens
VDDQIAIVFK

SEQ ID NO: 4845 - protein, 10 aa, Homo sapiens
VDDQIAIVFK

SEQ ID NO: 4846 - protein, 13 aa, Homo sapiens
WIDETPPVDQPSR

SEQ ID NO: 4847 - protein, 13 aa, Homo sapiens
WIDETPPVDQPSR

SEQ ID NO: 4848 - protein, 13 aa, Homo sapiens
WIDETPPVDQPSR

SEQ ID NO: 4849 - protein, 13 aa, Homo sapiens
WIDETPPVDQPSR

SEQ ID NO: 4850 - protein, 11 aa, Homo sapiens
DLQYSTDYTFK

SEQ ID NO: 4851 - protein, 11 aa, Homo sapiens
DLQYSTDYTFK

SEQ ID NO: 4852 - protein, 11 aa, Homo sapiens
DLQYSTDYTFK

SEQ ID NO: 4853 - protein, 11 aa, Homo sapiens
DLQYSTDYTFK

SEQ ID NO: 4854 - protein, 16 aa, Homo sapiens
SEAAHQGVITWNPPQR

SEQ ID NO: 4855 - protein, 16 aa, Homo sapiens
SEAAHQGVITWNPPQR

SEQ ID NO: 4856 - protein, 16 aa, Homo sapiens
SEAAHQGVITWNPPQR

SEQ ID NO: 4857 - protein, 16 aa, Homo sapiens
SEAAHQGVITWNPPQR

SEQ ID NO: 4858 - protein, 12 aa, Homo sapiens
TLILDVPPGVEK

SEQ ID NO: 4859 - protein, 12 aa, Homo sapiens
TLILDVPPGVEK

SEQ ID NO: 4860 - protein, 12 aa, Homo sapiens
TLILDVPPGVEK

SEQ ID NO: 4861 - protein, 12 aa, Homo sapiens
TLILDVPPGVEK

SEQ ID NO: 4862 - protein, 11 aa, Homo sapiens
YDLQNLKPYTK

SEQ ID NO: 4863 - protein, 11 aa, Homo sapiens
YDLQNLKPYTK

SEQ ID NO: 4864 - protein, 11 aa, Homo sapiens
YDLQNLKPYTK

SEQ ID NO: 4865 - protein, 11 aa, Homo sapiens
YDLQNLKPYTK

SEQ ID NO: 4866 - protein, 11 aa, Homo sapiens
YVDILPYDYNR

SEQ ID NO: 4867 - protein, 11 aa, Homo sapiens
YVDILPYDYNR

SEQ ID NO: 4868 - protein, 11 aa, Homo sapiens
YVDILPYDYNR

SEQ ID NO: 4869 - protein, 11 aa, Homo sapiens
YVDILPYDYNR

SEQ ID NO: 4870 - protein, 26 aa, Homo sapiens
AGSPTAPVHDESLVGPVDPSSGQQSR

SEQ ID NO: 4871 - protein, 26 aa, Homo sapiens
AGSPTAPVHDESLVGPVDPSSGQQSR

SEQ ID NO: 4872 - protein, 26 aa, Homo sapiens
AGSPTAPVHDESLVGPVDPSSGQQSR

SEQ ID NO: 4873 - protein, 14 aa, Homo sapiens
AVSISPTNVILTWK

SEQ ID NO: 4874 - protein, 14 aa, Homo sapiens
AVSISPTNVILTWK

SEQ ID NO: 4875 - protein, 14 aa, Homo sapiens
AVSISPTNVILTWK

SEQ ID NO: 4876 - protein, 14 aa, Homo sapiens
AVSISPTNVILTWK

SEQ ID NO: 4877 - protein, 14 aa, Homo sapiens
TPSSTGPSPVFDIK

SEQ ID NO: 4878 - protein, 14 aa, Homo sapiens
TPSSTGPSPVFDIK

SEQ ID NO: 4879 - protein, 14 aa, Homo sapiens
TPSSTGPSPVFDIK

SEQ ID NO: 4880 - protein, 14 aa, Homo sapiens
TPSSTGPSPVFDIK

SEQ ID NO: 4881 - protein, 12 aa, Homo sapiens
VITEPIPVSDLR

SEQ ID NO: 4882 - protein, 12 aa, Homo sapiens
VITEPIPVSDLR

SEQ ID NO: 4883 - protein, 12 aa, Homo sapiens
VITEPIPVSDLR

SEQ ID NO: 4884 - protein, 12 aa, Homo sapiens
VITEPIPVSDLR

SEQ ID NO: 4885 - protein, 17 aa, Homo sapiens
VLLESIGSHEELTQDSR

SEQ ID NO: 4886 - protein, 17 aa, Homo sapiens
VLLESIGSHEELTQDSR

SEQ ID NO: 4887 - protein, 17 aa, Homo sapiens
VLLESIGSHEELTQDSR

SEQ ID NO: 4888 - protein, 17 aa, Homo sapiens
VLLESIGSHEELTQDSR

SEQ ID NO: 4889 - protein, 12 aa, Homo sapiens
EGPPSEHSGISR

SEQ ID NO: 4890 - protein, 12 aa, Homo sapiens
EGPPSEHSGISR

SEQ ID NO: 4891 - protein, 12 aa, Homo sapiens
EGPPSEHSGISR

SEQ ID NO: 4892 - protein, 12 aa, Homo sapiens
EGPPSEHSGISR

SEQ ID NO: 4893 - protein, 14 aa, Homo sapiens
ENSSSQDPQTEGTR

SEQ ID NO: 4894 - protein, 14 aa, Homo sapiens
ENSSSQDPQTEGTR

SEQ ID NO: 4895 - protein, 14 aa, Homo sapiens
ENSSSQDPQTEGTR

SEQ ID NO: 4896 - protein, 14 aa, Homo sapiens
ENSSSQDPQTEGTR

SEQ ID NO: 4897 - protein, 9 aa, Homo sapiens
QAELTVQVK

SEQ ID NO: 4898 - protein, 9 aa, Homo sapiens
QAELTVQVK

SEQ ID NO: 4899 - protein, 9 aa, Homo sapiens
QAELTVQVK

SEQ ID NO: 4900 - protein, 9 aa, Homo sapiens
QAELTVQVK

SEQ ID NO: 4901 - protein, 7 aa, Homo sapiens
SVDIWLR

SEQ ID NO: 4902 - protein, 7 aa, Homo sapiens
SVDIWLR

SEQ ID NO: 4903 - protein, 7 aa, Homo sapiens
SVDIWLR

SEQ ID NO: 4904 - protein, 7 aa, Homo sapiens
SVDIWLR

SEQ ID NO: 4905 - protein, 13 aa, Homo sapiens
VLAKPQNTAEVQK

SEQ ID NO: 4906 - protein, 13 aa, Homo sapiens
VLAKPQNTAEVQK

SEQ ID NO: 4907 - protein, 13 aa, Homo sapiens
VLAKPQNTAEVQK

SEQ ID NO: 4908 - protein, 13 aa, Homo sapiens
VLAKPQNTAEVQK

SEQ ID NO: 4909 - protein, 10 aa, Homo sapiens
DNINIEEAAR

SEQ ID NO: 4910 - protein, 10 aa, Homo sapiens
DNINIEEAAR

SEQ ID NO: 4911 - protein, 10 aa, Homo sapiens
DNINIEEAAR

SEQ ID NO: 4912 - protein, 10 aa, Homo sapiens
DNINIEEAAR

SEQ ID NO: 4913 - protein, 17 aa, Homo sapiens
ILVNHQSFPNEENDVDK

SEQ ID NO: 4914 - protein, 17 aa, Homo sapiens
ILVNHQSFPNEENDVDK

SEQ ID NO: 4915 - protein, 17 aa, Homo sapiens
ILVNHQSFPNEENDVDK

SEQ ID NO: 4916 - protein, 17 aa, Homo sapiens
ILVNHQSFPNEENDVDK

SEQ ID NO: 4917 - protein, 7 aa, Homo sapiens
LDQETLR

SEQ ID NO: 4918 - protein, 17 aa, Homo sapiens
VHLPNGSPIPAVLLANK

SEQ ID NO: 4919 - protein, 17 aa, Homo sapiens
VHLPNGSPIPAVLLANK

SEQ ID NO: 4920 - protein, 17 aa, Homo sapiens
VHLPNGSPIPAVLLANK

SEQ ID NO: 4921 - protein, 17 aa, Homo sapiens
VHLPNGSPIPAVLLANK

SEQ ID NO: 4922 - protein, 11 aa, Homo sapiens
VLVIGELGVGK

SEQ ID NO: 4923 - protein, 11 aa, Homo sapiens
VLVIGELGVGK

SEQ ID NO: 4924 - protein, 11 aa, Homo sapiens
VLVIGELGVGK

SEQ ID NO: 4925 - protein, 11 aa, Homo sapiens
VLVIGELGVGK

SEQ ID NO: 4926 - protein, 19 aa, Homo sapiens
AELNQSEEPEAGESSTGGP

SEQ ID NO: 4927 - protein, 19 aa, Homo sapiens
AELNQSEEPEAGESSTGGP

SEQ ID NO: 4928 - protein, 19 aa, Homo sapiens
AELNQSEEPEAGESSTGGP

SEQ ID NO: 4929 - protein, 19 aa, Homo sapiens
AELNQSEEPEAGESSTGGP

SEQ ID NO: 4930 - protein, 8 aa, Homo sapiens
IGEPLVLK

SEQ ID NO: 4931 - protein, 8 aa, Homo sapiens
IGEPLVLK

SEQ ID NO: 4932 - protein, 8 aa, Homo sapiens
IGEPLVLK

SEQ ID NO: 4933 - protein, 8 aa, Homo sapiens
IGEPLVLK

SEQ ID NO: 4934 - protein, 21 aa, Homo sapiens
VLPNGSLFLPAVGIQDEGIFR

SEQ ID NO: 4935 - protein, 21 aa, Homo sapiens
VLPNGSLFLPAVGIQDEGIFR

SEQ ID NO: 4936 - protein, 21 aa, Homo sapiens
VLPNGSLFLPAVGIQDEGIFR

SEQ ID NO: 4937 - protein, 21 aa, Homo sapiens
VLPNGSLFLPAVGIQDEGIFR

SEQ ID NO: 4938 - protein, 15 aa, Homo sapiens
VLSPQGGGPWDSVAR

SEQ ID NO: 4939 - protein, 15 aa, Homo sapiens
VLSPQGGGPWDSVAR

SEQ ID NO: 4940 - protein, 15 aa, Homo sapiens
VLSPQGGGPWDSVAR

SEQ ID NO: 4941 - protein, 15 aa, Homo sapiens
VLSPQGGGPWDSVAR

SEQ ID NO: 4942 - protein, 24 aa, Homo sapiens
VYQIPGKPEIVDSASELTAGVPNK

SEQ ID NO: 4943 - protein, 24 aa, Homo sapiens
VYQIPGKPEIVDSASELTAGVPNK

SEQ ID NO: 4944 - protein, 24 aa, Homo sapiens
VYQIPGKPEIVDSASELTAGVPNK

SEQ ID NO: 4945 - protein, 24 aa, Homo sapiens
VYQIPGKPEIVDSASELTAGVPNK

SEQ ID NO: 4946 - protein, 11 aa, Homo sapiens
FNVWDTAGQEK

SEQ ID NO: 4947 - protein, 11 aa, Homo sapiens
FNVWDTAGQEK

SEQ ID NO: 4948 - protein, 11 aa, Homo sapiens
FNVWDTAGQEK

SEQ ID NO: 4949 - protein, 11 aa, Homo sapiens
FNVWDTAGQEK

SEQ ID NO: 4950 - protein, 11 aa, Homo sapiens
LVLVGDGGTGK

SEQ ID NO: 4951 - protein, 11 aa, Homo sapiens
LVLVGDGGTGK

SEQ ID NO: 4952 - protein, 11 aa, Homo sapiens
LVLVGDGGTGK

SEQ ID NO: 4953 - protein, 11 aa, Homo sapiens
LVLVGDGGTGK

SEQ ID NO: 4954 - protein, 7 aa, Homo sapiens
NVPNWHR

SEQ ID NO: 4955 - protein, 7 aa, Homo sapiens
NVPNWHR

SEQ ID NO: 4956 - protein, 12 aa, Homo sapiens
ASVDELFAEIVR

SEQ ID NO: 4957 - protein, 12 aa, Homo sapiens
ASVDELFAEIVR

SEQ ID NO: 4958 - protein, 12 aa, Homo sapiens
ASVDELFAEIVR

SEQ ID NO: 4959 - protein, 12 aa, Homo sapiens
ASVDELFAEIVR

SEQ ID NO: 4960 - protein, 8 aa, Homo sapiens
EVSYGEGK

SEQ ID NO: 4961 - protein, 8 aa, Homo sapiens
EVSYGEGK

SEQ ID NO: 4962 - protein, 8 aa, Homo sapiens
EVSYGEGK

SEQ ID NO: 4963 - protein, 8 aa, Homo sapiens
EVSYGEGK

SEQ ID NO: 4964 - protein, 15 aa, Homo sapiens
SALTVQFVTGSFIEK

SEQ ID NO: 4965 - protein, 7 aa, Homo sapiens
VDLEGER

SEQ ID NO: 4966 - protein, 7 aa, Homo sapiens
VDLEGER

SEQ ID NO: 4967 - protein, 7 aa, Homo sapiens
VDLEGER

SEQ ID NO: 4968 - protein, 7 aa, Homo sapiens
VDLEGER

SEQ ID NO: 4969 - protein, 11 aa, Homo sapiens
VVVLGSGGVGK

SEQ ID NO: 4970 - protein, 11 aa, Homo sapiens
VVVLGSGGVGK

SEQ ID NO: 4971 - protein, 11 aa, Homo sapiens
VVVLGSGGVGK

SEQ ID NO: 4972 - protein, 11 aa, Homo sapiens
VVVLGSGGVGK

SEQ ID NO: 4973 - protein, 15 aa, Homo sapiens
SALTVQFVTGTFIEK

SEQ ID NO: 4974 - protein, 7 aa, Homo sapiens
VDLEPER

SEQ ID NO: 4975 - protein, 9 aa, Homo sapiens
VPLILVGNK

SEQ ID NO: 4976 - protein, 9 aa, Homo sapiens
VPLILVGNK

SEQ ID NO: 4977 - protein, 9 aa, Homo sapiens
VPLILVGNK

SEQ ID NO: 4978 - protein, 9 aa, Homo sapiens
VPLILVGNK

SEQ ID NO: 4979 - protein, 11 aa, Homo sapiens
VVVLGSGGVGK

SEQ ID NO: 4980 - protein, 11 aa, Homo sapiens
VVVLGSGGVGK

SEQ ID NO: 4981 - protein, 11 aa, Homo sapiens
VVVLGSGGVGK

SEQ ID NO: 4982 - protein, 11 aa, Homo sapiens
VVVLGSGGVGK

SEQ ID NO: 4983 - protein, 14 aa, Homo sapiens
AGDGDGWVSLAELR

SEQ ID NO: 4984 - protein, 14 aa, Homo sapiens
AGDGDGWVSLAELR

SEQ ID NO: 4985 - protein, 14 aa, Homo sapiens
AGDGDGWVSLAELR

SEQ ID NO: 4986 - protein, 14 aa, Homo sapiens
AGDGDGWVSLAELR

SEQ ID NO: 4987 - protein, 9 aa, Homo sapiens
AWIAHTQQR

SEQ ID NO: 4988 - protein, 9 aa, Homo sapiens
AWIAHTQQR

SEQ ID NO: 4989 - protein, 9 aa, Homo sapiens
AWIAHTQQR

SEQ ID NO: 4990 - protein, 9 aa, Homo sapiens
AWIAHTQQR

SEQ ID NO: 4991 - protein, 13 aa, Homo sapiens
DIVIAETLEDLDR

SEQ ID NO: 4992 - protein, 13 aa, Homo sapiens
DIVIAETLEDLDR

SEQ ID NO: 4993 - protein, 13 aa, Homo sapiens
DIVIAETLEDLDR

SEQ ID NO: 4994 - protein, 13 aa, Homo sapiens
DIVIAETLEDLDR

SEQ ID NO: 4995 - protein, 13 aa, Homo sapiens
EFDQLTPEESQAR

SEQ ID NO: 4996 - protein, 13 aa, Homo sapiens
EFDQLTPEESQAR

SEQ ID NO: 4997 - protein, 13 aa, Homo sapiens
EFDQLTPEESQAR

SEQ ID NO: 4998 - protein, 13 aa, Homo sapiens
EFDQLTPEESQAR

SEQ ID NO: 4999 - protein, 7 aa, Homo sapiens
VGWEELR

SEQ ID NO: 5000 - protein, 7 aa, Homo sapiens
VGWEELR

SEQ ID NO: 5001 - protein, 7 aa, Homo sapiens
VGWEELR

SEQ ID NO: 5002 - protein, 7 aa, Homo sapiens
VGWEELR

SEQ ID NO: 5003 - protein, 8 aa, Homo sapiens
VFQFLNAK

SEQ ID NO: 5004 - protein, 8 aa, Homo sapiens
VFQFLNAK

SEQ ID NO: 5005 - protein, 8 aa, Homo sapiens
VFQFLNAK

SEQ ID NO: 5006 - protein, 8 aa, Homo sapiens
VFQFLNAK

SEQ ID NO: 5007 - protein, 7 aa, Homo sapiens
DVDAVDK

SEQ ID NO: 5008 - protein, 7 aa, Homo sapiens
DVDAVDK

SEQ ID NO: 5009 - protein, 7 aa, Homo sapiens
DVDAVDK

SEQ ID NO: 5010 - protein, 7 aa, Homo sapiens
DVDAVDK

SEQ ID NO: 5011 - protein, 15 aa, Homo sapiens
ELLQTELSGFLDAQK

SEQ ID NO: 5012 - protein, 15 aa, Homo sapiens
ELLQTELSGFLDAQK

SEQ ID NO: 5013 - protein, 15 aa, Homo sapiens
ELLQTELSGFLDAQK

SEQ ID NO: 5014 - protein, 15 aa, Homo sapiens
ELLQTELSGFLDAQK

SEQ ID NO: 5015 - protein, 25 aa, Homo sapiens
DQEVNFQEYVTFLGALALIYNEALK

SEQ ID NO: 5016 - protein, 7 aa, Homo sapiens
ELTIGSK

SEQ ID NO: 5017 - protein, 7 aa, Homo sapiens
ELTIGSK

SEQ ID NO: 5018 - protein, 7 aa, Homo sapiens
ELTIGSK

SEQ ID NO: 5019 - protein, 7 aa, Homo sapiens
ELTIGSK

SEQ ID NO: 5020 - protein, 8 aa, Homo sapiens
LQDAEIAR

SEQ ID NO: 5021 - protein, 8 aa, Homo sapiens
LQDAEIAR

SEQ ID NO: 5022 - protein, 8 aa, Homo sapiens
LQDAEIAR

SEQ ID NO: 5023 - protein, 8 aa, Homo sapiens
LQDAEIAR

SEQ ID NO: 5024 - protein, 13 aa, Homo sapiens
DPNHFRPAGLPEK

SEQ ID NO: 5025 - protein, 13 aa, Homo sapiens
DPNHFRPAGLPEK

SEQ ID NO: 5026 - protein, 13 aa, Homo sapiens
DPNHFRPAGLPEK

SEQ ID NO: 5027 - protein, 13 aa, Homo sapiens
DPNHFRPAGLPEK

SEQ ID NO: 5028 - protein, 9 aa, Homo sapiens
EANYIGSDK

SEQ ID NO: 5029 - protein, 9 aa, Homo sapiens
EANYIGSDK

SEQ ID NO: 5030 - protein, 9 aa, Homo sapiens
EANYIGSDK

SEQ ID NO: 5031 - protein, 9 aa, Homo sapiens
EANYIGSDK

SEQ ID NO: 5032 - protein, 20 aa, Homo sapiens
FFGHGAEDSLADQAANEWGR

SEQ ID NO: 5033 - protein, 20 aa, Homo sapiens
FFGHGAEDSLADQAANEWGR

SEQ ID NO: 5034 - protein, 20 aa, Homo sapiens
FFGHGAEDSLADQAANEWGR

SEQ ID NO: 5035 - protein, 20 aa, Homo sapiens
FFGHGAEDSLADQAANEWGR

SEQ ID NO: 5036 - protein, 14 aa, Homo sapiens
SFFSFLGEAFDGAR

SEQ ID NO: 5037 - protein, 14 aa, Homo sapiens
SFFSFLGEAFDGAR

SEQ ID NO: 5038 - protein, 14 aa, Homo sapiens
SFFSFLGEAFDGAR

SEQ ID NO: 5039 - protein, 14 aa, Homo sapiens
SFFSFLGEAFDGAR

SEQ ID NO: 5040 - protein, 16 aa, Homo sapiens
FSNISEGLSNYSIIDK

SEQ ID NO: 5041 - protein, 16 aa, Homo sapiens
FSNISEGLSNYSIIDK

SEQ ID NO: 5042 - protein, 16 aa, Homo sapiens
FSNISEGLSNYSIIDK

SEQ ID NO: 5043 - protein, 16 aa, Homo sapiens
FSNISEGLSNYSIIDK

SEQ ID NO: 5044 - protein, 9 aa, Homo sapiens
LFTPEEFFR

SEQ ID NO: 5045 - protein, 9 aa, Homo sapiens
LFTPEEFFR

SEQ ID NO: 5046 - protein, 9 aa, Homo sapiens
LFTPEEFFR

SEQ ID NO: 5047 - protein, 9 aa, Homo sapiens
LFTPEEFFR

SEQ ID NO: 5048 - protein, 7 aa, Homo sapiens
LVANLPK

SEQ ID NO: 5049 - protein, 7 aa, Homo sapiens
LVANLPK

SEQ ID NO: 5050 - protein, 7 aa, Homo sapiens
LVANLPK

SEQ ID NO: 5051 - protein, 7 aa, Homo sapiens
LVANLPK

SEQ ID NO: 5052 - protein, 34 aa, Homo sapiens
DTQLLTAIPTSPEPTGLEATAASTSTLPAGEGPK

SEQ ID NO: 5053 - protein, 17 aa, Homo sapiens
EGEAVVLPEVEPGLTAR

SEQ ID NO: 5054 - protein, 17 aa, Homo sapiens
EGEAVVLPEVEPGLTAR

SEQ ID NO: 5055 - protein, 17 aa, Homo sapiens
EGEAVVLPEVEPGLTAR

SEQ ID NO: 5056 - protein, 17 aa, Homo sapiens
EGEAVVLPEVEPGLTAR

SEQ ID NO: 5057 - protein, 9 aa, Homo sapiens
EQEATPRPR

SEQ ID NO: 5058 - protein, 29 aa, Homo sapiens
ETTQLPTTHLASTTTATTAQEPATSHPHR

SEQ ID NO: 5059 - protein, 12 aa, Homo sapiens
QANGGAYQKPTK

SEQ ID NO: 5060 - protein, 12 aa, Homo sapiens
QANGGAYQKPTK

SEQ ID NO: 5061 - protein, 12 aa, Homo sapiens
QANGGAYQKPTK

SEQ ID NO: 5062 - protein, 12 aa, Homo sapiens
QANGGAYQKPTK

SEQ ID NO: 5063 - protein, 13 aa, Homo sapiens
DILQLIGFANLPR

SEQ ID NO: 5064 - protein, 13 aa, Homo sapiens
DILQLIGFANLPR

SEQ ID NO: 5065 - protein, 13 aa, Homo sapiens
DILQLIGFANLPR

SEQ ID NO: 5066 - protein, 13 aa, Homo sapiens
DILQLIGFANLPR

SEQ ID NO: 5067 - protein, 11 aa, Homo sapiens
DYPDEVLQFAR

SEQ ID NO: 5068 - protein, 11 aa, Homo sapiens
DYPDEVLQFAR

SEQ ID NO: 5069 - protein, 11 aa, Homo sapiens
DYPDEVLQFAR

SEQ ID NO: 5070 - protein, 11 aa, Homo sapiens
DYPDEVLQFAR

SEQ ID NO: 5071 - protein, 11 aa, Homo sapiens
EVLWPPQPGQR

SEQ ID NO: 5072 - protein, 11 aa, Homo sapiens
EVLWPPQPGQR

SEQ ID NO: 5073 - protein, 11 aa, Homo sapiens
EVLWPPQPGQR

SEQ ID NO: 5074 - protein, 11 aa, Homo sapiens
EVLWPPQPGQR

SEQ ID NO: 5075 - protein, 13 aa, Homo sapiens
LFLGGLDALYSLR

SEQ ID NO: 5076 - protein, 13 aa, Homo sapiens
LFLGGLDALYSLR

SEQ ID NO: 5077 - protein, 13 aa, Homo sapiens
LFLGGLDALYSLR

SEQ ID NO: 5078 - protein, 13 aa, Homo sapiens
LFLGGLDALYSLR

SEQ ID NO: 5079 - protein, 24 aa, Homo sapiens
VIALQAGGSAEPEEVVLEELQVFK

SEQ ID NO: 5080 - protein, 24 aa, Homo sapiens
VIALQAGGSAEPEEVVLEELQVFK

SEQ ID NO: 5081 - protein, 24 aa, Homo sapiens
VIALQAGGSAEPEEVVLEELQVFK

SEQ ID NO: 5082 - protein, 24 aa, Homo sapiens
VIALQAGGSAEPEEVVLEELQVFK

SEQ ID NO: 5083 - protein, 12 aa, Homo sapiens
LAYVYQNNIYLK

SEQ ID NO: 5084 - protein, 12 aa, Homo sapiens
LAYVYQNNIYLK

SEQ ID NO: 5085 - protein, 12 aa, Homo sapiens
LAYVYQNNIYLK

SEQ ID NO: 5086 - protein, 12 aa, Homo sapiens
LAYVYQNNIYLK

SEQ ID NO: 5087 - protein, 25 aa, Homo sapiens
NVDYLLIHGTADDNVHFQNSAQIAK

SEQ ID NO: 5088 - protein, 11 aa, Homo sapiens
QFVYLESDYSK

SEQ ID NO: 5089 - protein, 11 aa, Homo sapiens
QFVYLESDYSK

SEQ ID NO: 5090 - protein, 11 aa, Homo sapiens
QFVYLESDYSK

SEQ ID NO: 5091 - protein, 11 aa, Homo sapiens
QFVYLESDYSK

SEQ ID NO: 5092 - protein, 14 aa, Homo sapiens
SVFAVNWISYLASK

SEQ ID NO: 5093 - protein, 9 aa, Homo sapiens
TQEHIEESR

SEQ ID NO: 5094 - protein, 9 aa, Homo sapiens
TQEHIEESR

SEQ ID NO: 5095 - protein, 9 aa, Homo sapiens
TQEHIEESR

SEQ ID NO: 5096 - protein, 9 aa, Homo sapiens
TQEHIEESR

SEQ ID NO: 5097 - protein, 9 aa, Homo sapiens
AVLSAEQLR

SEQ ID NO: 5098 - protein, 9 aa, Homo sapiens
AVLSAEQLR

SEQ ID NO: 5099 - protein, 9 aa, Homo sapiens
AVLSAEQLR

SEQ ID NO: 5100 - protein, 9 aa, Homo sapiens
AVLSAEQLR

SEQ ID NO: 5101 - protein, 13 aa, Homo sapiens
DEEVHAGLGELLR

SEQ ID NO: 5102 - protein, 13 aa, Homo sapiens
DEEVHAGLGELLR

SEQ ID NO: 5103 - protein, 13 aa, Homo sapiens
DEEVHAGLGELLR

SEQ ID NO: 5104 - protein, 13 aa, Homo sapiens
DEEVHAGLGELLR

SEQ ID NO: 5105 - protein, 26 aa, Homo sapiens
DQAVENILVSPVVVASSLGLVSLGGK

SEQ ID NO: 5106 - protein, 26 aa, Homo sapiens
DQAVENILVSPVVVASSLGLVSLGGK

SEQ ID NO: 5107 - protein, 26 aa, Homo sapiens
DQAVENILVSPVVVASSLGLVSLGGK

SEQ ID NO: 5108 - protein, 26 aa, Homo sapiens
DQAVENILVSPVVVASSLGLVSLGGK

SEQ ID NO: 5109 - protein, 12 aa, Homo sapiens
DTQSGSLLFIGR

SEQ ID NO: 5110 - protein, 12 aa, Homo sapiens
DTQSGSLLFIGR

SEQ ID NO: 5111 - protein, 12 aa, Homo sapiens
DTQSGSLLFIGR

SEQ ID NO: 5112 - protein, 12 aa, Homo sapiens
DTQSGSLLFIGR

SEQ ID NO: 5113 - protein, 11 aa, Homo sapiens
GVVEVTHDLQK

SEQ ID NO: 5114 - protein, 11 aa, Homo sapiens
GVVEVTHDLQK

SEQ ID NO: 5115 - protein, 11 aa, Homo sapiens
GVVEVTHDLQK

SEQ ID NO: 5116 - protein, 11 aa, Homo sapiens
GVVEVTHDLQK

SEQ ID NO: 5117 - protein, 21 aa, Homo sapiens
GPPGLPAHLDEELQATLHDFR

SEQ ID NO: 5118 - protein, 21 aa, Homo sapiens
GPPGLPAHLDEELQATLHDFR

SEQ ID NO: 5119 - protein, 21 aa, Homo sapiens
GPPGLPAHLDEELQATLHDFR

SEQ ID NO: 5120 - protein, 21 aa, Homo sapiens
GPPGLPAHLDEELQATLHDFR

SEQ ID NO: 5121 - protein, 7 aa, Homo sapiens
HQILQTR

SEQ ID NO: 5122 - protein, 7 aa, Homo sapiens
HQILQTR

SEQ ID NO: 5123 - protein, 7 aa, Homo sapiens
HQILQTR

SEQ ID NO: 5124 - protein, 7 aa, Homo sapiens
HQILQTR

SEQ ID NO: 5125 - protein, 14 aa, Homo sapiens
YSDGTPVNYTNWYR

SEQ ID NO: 5126 - protein, 14 aa, Homo sapiens
YSDGTPVNYTNWYR

SEQ ID NO: 5127 - protein, 14 aa, Homo sapiens
YSDGTPVNYTNWYR

SEQ ID NO: 5128 - protein, 14 aa, Homo sapiens
YSDGTPVNYTNWYR

SEQ ID NO: 5129 - protein, 21 aa, Homo sapiens
GPPGLPAHLDEELQATLHDFR

SEQ ID NO: 5130 - protein, 21 aa, Homo sapiens
GPPGLPAHLDEELQATLHDFR

SEQ ID NO: 5131 - protein, 21 aa, Homo sapiens
GPPGLPAHLDEELQATLHDFR

SEQ ID NO: 5132 - protein, 21 aa, Homo sapiens
GPPGLPAHLDEELQATLHDFR

SEQ ID NO: 5133 - protein, 7 aa, Homo sapiens
HQILQTR

SEQ ID NO: 5134 - protein, 7 aa, Homo sapiens
HQILQTR

SEQ ID NO: 5135 - protein, 7 aa, Homo sapiens
HQILQTR

SEQ ID NO: 5136 - protein, 7 aa, Homo sapiens
HQILQTR

SEQ ID NO: 5137 - protein, 14 aa, Homo sapiens
YSDGTPVNYTNWYR

SEQ ID NO: 5138 - protein, 14 aa, Homo sapiens
YSDGTPVNYTNWYR

SEQ ID NO: 5139 - protein, 14 aa, Homo sapiens
YSDGTPVNYTNWYR

SEQ ID NO: 5140 - protein, 14 aa, Homo sapiens
YSDGTPVNYTNWYR

SEQ ID NO: 5141 - protein, 7 aa, Homo sapiens
VPLPVDK

SEQ ID NO: 5142 - protein, 7 aa, Homo sapiens
VPLPVDK

SEQ ID NO: 5143 - protein, 7 aa, Homo sapiens
VPLPVDK

SEQ ID NO: 5144 - protein, 7 aa, Homo sapiens
VPLPVDK

SEQ ID NO: 5145 - protein, 12 aa, Homo sapiens
AGYPLEHPFDFR

SEQ ID NO: 5146 - protein, 15 aa, Homo sapiens
ALPSQGLSSSAVLEK

SEQ ID NO: 5147 - protein, 15 aa, Homo sapiens
ALPSQGLSSSAVLEK

SEQ ID NO: 5148 - protein, 15 aa, Homo sapiens
ALPSQGLSSSAVLEK

SEQ ID NO: 5149 - protein, 15 aa, Homo sapiens
ALPSQGLSSSAVLEK

SEQ ID NO: 5150 - protein, 6 aa, Homo sapiens
DFDIYR

SEQ ID NO: 5151 - protein, 18 aa, Homo sapiens
GIFVFGNPQLSVIALGSR

SEQ ID NO: 5152 - protein, 16 aa, Homo sapiens
TPEIVAPQSAHAAFNK

SEQ ID NO: 5153 - protein, 16 aa, Homo sapiens
TPEIVAPQSAHAAFNK

SEQ ID NO: 5154 - protein, 16 aa, Homo sapiens
TPEIVAPQSAHAAFNK

SEQ ID NO: 5155 - protein, 16 aa, Homo sapiens
TPEIVAPQSAHAAFNK

SEQ ID NO: 5156 - protein, 10 aa, Homo sapiens
AYEDEYSYFK

SEQ ID NO: 5157 - protein, 10 aa, Homo sapiens
AYEDEYSYFK

SEQ ID NO: 5158 - protein, 10 aa, Homo sapiens
AYEDEYSYFK

SEQ ID NO: 5159 - protein, 10 aa, Homo sapiens
AYEDEYSYFK

SEQ ID NO: 5160 - protein, 16 aa, Homo sapiens
GQGYDGYDGQNYYHHQ

SEQ ID NO: 5161 - protein, 16 aa, Homo sapiens
GQGYDGYDGQNYYHHQ

SEQ ID NO: 5162 - protein, 16 aa, Homo sapiens
GQGYDGYDGQNYYHHQ

SEQ ID NO: 5163 - protein, 16 aa, Homo sapiens
GQGYDGYDGQNYYHHQ

SEQ ID NO: 5164 - protein, 11 aa, Homo sapiens
IEDSEENGVFK

SEQ ID NO: 5165 - protein, 11 aa, Homo sapiens
IEDSEENGVFK

SEQ ID NO: 5166 - protein, 11 aa, Homo sapiens
IEDSEENGVFK

SEQ ID NO: 5167 - protein, 11 aa, Homo sapiens
IEDSEENGVFK

SEQ ID NO: 5168 - protein, 8 aa, Homo sapiens
TTSPPFGK

SEQ ID NO: 5169 - protein, 8 aa, Homo sapiens
TTSPPFGK

SEQ ID NO: 5170 - protein, 8 aa, Homo sapiens
TTSPPFGK

SEQ ID NO: 5171 - protein, 8 aa, Homo sapiens
TTSPPFGK

SEQ ID NO: 5172 - protein, 19 aa, Homo sapiens
TTTSPNGGFEPTTPPQVYR

SEQ ID NO: 5173 - protein, 19 aa, Homo sapiens
TTTSPNGGFEPTTPPQVYR

SEQ ID NO: 5174 - protein, 19 aa, Homo sapiens
TTTSPNGGFEPTTPPQVYR

SEQ ID NO: 5175 - protein, 19 aa, Homo sapiens
TTTSPNGGFEPTTPPQVYR

SEQ ID NO: 5176 - protein, 26 aa, Homo sapiens
SSGLFPFLVLLALGTLAPWAVEGSGK

SEQ ID NO: 5177 - protein, 8 aa, Homo sapiens
NQGSGAGR

SEQ ID NO: 5178 - protein, 10 aa, Homo sapiens
VAQLEQVYIR

SEQ ID NO: 5179 - protein, 5 aa, Homo sapiens
NFFWK

SEQ ID NO: 5180 - protein, 5 aa, Homo sapiens
NFFWK

SEQ ID NO: 5181 - protein, 5 aa, Homo sapiens
NFFWK

SEQ ID NO: 5182 - protein, 5 aa, Homo sapiens
NFFWK

SEQ ID NO: 5183 - protein, 14 aa, Homo sapiens
AIWNVINWENVTER

SEQ ID NO: 5184 - protein, 25 aa, Homo sapiens
FNGGGHINHSIFWTNLSPNGGGEPK

SEQ ID NO: 5185 - protein, 25 aa, Homo sapiens
FNGGGHINHSIFWTNLSPNGGGEPK

SEQ ID NO: 5186 - protein, 25 aa, Homo sapiens
FNGGGHINHSIFWTNLSPNGGGEPK

SEQ ID NO: 5187 - protein, 25 aa, Homo sapiens
FNGGGHINHSIFWTNLSPNGGGEPK

SEQ ID NO: 5188 - protein, 14 aa, Homo sapiens
GDVTAQIALQPALK

SEQ ID NO: 5189 - protein, 14 aa, Homo sapiens
GDVTAQIALQPALK

SEQ ID NO: 5190 - protein, 14 aa, Homo sapiens
GDVTAQIALQPALK

SEQ ID NO: 5191 - protein, 14 aa, Homo sapiens
GDVTAQIALQPALK

SEQ ID NO: 5192 - protein, 20 aa, Homo sapiens
LTAASVGVQGSGWGWLGFNK

SEQ ID NO: 5193 - protein, 8 aa, Homo sapiens
NVRPDYLK

SEQ ID NO: 5194 - protein, 8 aa, Homo sapiens
NVRPDYLK

SEQ ID NO: 5195 - protein, 8 aa, Homo sapiens
NVRPDYLK

SEQ ID NO: 5196 - protein, 8 aa, Homo sapiens
NVRPDYLK

SEQ ID NO: 5197 - protein, 11 aa, Homo sapiens
ENQEVILEEVR

SEQ ID NO: 5198 - protein, 11 aa, Homo sapiens
ENQEVILEEVR

SEQ ID NO: 5199 - protein, 11 aa, Homo sapiens
ENQEVILEEVR

SEQ ID NO: 5200 - protein, 11 aa, Homo sapiens
ENQEVILEEVR

SEQ ID NO: 5201 - protein, 15 aa, Homo sapiens
ESAPGLIIATGSVGK

SEQ ID NO: 5202 - protein, 15 aa, Homo sapiens
ESAPGLIIATGSVGK

SEQ ID NO: 5203 - protein, 15 aa, Homo sapiens
ESAPGLIIATGSVGK

SEQ ID NO: 5204 - protein, 15 aa, Homo sapiens
ESAPGLIIATGSVGK

SEQ ID NO: 5205 - protein, 12 aa, Homo sapiens
LHGGSAPLPQDR

SEQ ID NO: 5206 - protein, 12 aa, Homo sapiens
LHGGSAPLPQDR

SEQ ID NO: 5207 - protein, 12 aa, Homo sapiens
LHGGSAPLPQDR

SEQ ID NO: 5208 - protein, 12 aa, Homo sapiens
LHGGSAPLPQDR

SEQ ID NO: 5209 - protein, 12 aa, Homo sapiens
LHGGSAPLPQDR

SEQ ID NO: 5210 - protein, 12 aa, Homo sapiens
LHGGSAPLPQDR

SEQ ID NO: 5211 - protein, 12 aa, Homo sapiens
LHGGSAPLPQDR

SEQ ID NO: 5212 - protein, 12 aa, Homo sapiens
LHGGSAPLPQDR

SEQ ID NO: 5213 - protein, 10 aa, Homo sapiens
GLVLSGVLHK

SEQ ID NO: 5214 - protein, 10 aa, Homo sapiens
GLVLSGVLHK

SEQ ID NO: 5215 - protein, 10 aa, Homo sapiens
GLVLSGVLHK

SEQ ID NO: 5216 - protein, 10 aa, Homo sapiens
GLVLSGVLHK

SEQ ID NO: 5217 - protein, 23 aa, Homo sapiens
NLIPEGNIGSNTTLVLVNAIYFK

SEQ ID NO: 5218 - protein, 16 aa, Homo sapiens
QYTSFHFASLEDVQAK

SEQ ID NO: 5219 - protein, 16 aa, Homo sapiens
QYTSFHFASLEDVQAK

SEQ ID NO: 5220 - protein, 16 aa, Homo sapiens
QYTSFHFASLEDVQAK

SEQ ID NO: 5221 - protein, 16 aa, Homo sapiens
QYTSFHFASLEDVQAK

SEQ ID NO: 5222 - protein, 7 aa, Homo sapiens
VDLHLPR

SEQ ID NO: 5223 - protein, 7 aa, Homo sapiens
VDLHLPR

SEQ ID NO: 5224 - protein, 7 aa, Homo sapiens
VDLHLPR

SEQ ID NO: 5225 - protein, 7 aa, Homo sapiens
VDLHLPR

SEQ ID NO: 5226 - protein, 7 aa, Homo sapiens
VLEIPYK

SEQ ID NO: 5227 - protein, 7 aa, Homo sapiens
VLEIPYK

SEQ ID NO: 5228 - protein, 7 aa, Homo sapiens
VLEIPYK

SEQ ID NO: 5229 - protein, 7 aa, Homo sapiens
VLEIPYK

SEQ ID NO: 5230 - protein, 14 aa, Homo sapiens
DELNADHPFIYIIR

SEQ ID NO: 5231 - protein, 14 aa, Homo sapiens
DELNADHPFIYIIR

SEQ ID NO: 5232 - protein, 14 aa, Homo sapiens
DELNADHPFIYIIR

SEQ ID NO: 5233 - protein, 14 aa, Homo sapiens
DELNADHPFIYIIR

SEQ ID NO: 5234 - protein, 21 aa, Homo sapiens
DLTDGHFENILADNSVNDQTK

SEQ ID NO: 5235 - protein, 11 aa, Homo sapiens
DVEDESTGLEK

SEQ ID NO: 5236 - protein, 11 aa, Homo sapiens
DVEDESTGLEK

SEQ ID NO: 5237 - protein, 11 aa, Homo sapiens
DVEDESTGLEK

SEQ ID NO: 5238 - protein, 11 aa, Homo sapiens
DVEDESTGLEK

SEQ ID NO: 5239 - protein, 15 aa, Homo sapiens
DVPFGFQTVTSDVNK

SEQ ID NO: 5240 - protein, 15 aa, Homo sapiens
DVPFGFQTVTSDVNK

SEQ ID NO: 5241 - protein, 15 aa, Homo sapiens
DVPFGFQTVTSDVNK

SEQ ID NO: 5242 - protein, 15 aa, Homo sapiens
DVPFGFQTVTSDVNK

SEQ ID NO: 5243 - protein, 12 aa, Homo sapiens
ILVVNAAYFVGK

SEQ ID NO: 5244 - protein, 12 aa, Homo sapiens
AFIPPAPVLPSR

SEQ ID NO: 5245 - protein, 12 aa, Homo sapiens
AFIPPAPVLPSR

SEQ ID NO: 5246 - protein, 12 aa, Homo sapiens
AFIPPAPVLPSR

SEQ ID NO: 5247 - protein, 12 aa, Homo sapiens
AFIPPAPVLPSR

SEQ ID NO: 5248 - protein, 7 aa, Homo sapiens
ALPPIAR

SEQ ID NO: 5249 - protein, 8 aa, Homo sapiens
WSQTAFPK

SEQ ID NO: 5250 - protein, 8 aa, Homo sapiens
WSQTAFPK

SEQ ID NO: 5251 - protein, 8 aa, Homo sapiens
WSQTAFPK

SEQ ID NO: 5252 - protein, 8 aa, Homo sapiens
WSQTAFPK

SEQ ID NO: 5253 - protein, 8 aa, Homo sapiens
YSITFTGK

SEQ ID NO: 5254 - protein, 8 aa, Homo sapiens
YSITFTGK

SEQ ID NO: 5255 - protein, 8 aa, Homo sapiens
YSITFTGK

SEQ ID NO: 5256 - protein, 8 aa, Homo sapiens
YSITFTGK

SEQ ID NO: 5257 - protein, 10 aa, Homo sapiens
DEDNNLLTEK

SEQ ID NO: 5258 - protein, 10 aa, Homo sapiens
DEDNNLLTEK

SEQ ID NO: 5259 - protein, 10 aa, Homo sapiens
DEDNNLLTEK

SEQ ID NO: 5260 - protein, 10 aa, Homo sapiens
DEDNNLLTEK

SEQ ID NO: 5261 - protein, 9 aa, Homo sapiens
NVLVTLYER

SEQ ID NO: 5262 - protein, 9 aa, Homo sapiens
NVLVTLYER

SEQ ID NO: 5263 - protein, 9 aa, Homo sapiens
NVLVTLYER

SEQ ID NO: 5264 - protein, 9 aa, Homo sapiens
NVLVTLYER

SEQ ID NO: 5265 - protein, 8 aa, Homo sapiens
EVLDQVER

SEQ ID NO: 5266 - protein, 8 aa, Homo sapiens
EVLDQVER

SEQ ID NO: 5267 - protein, 8 aa, Homo sapiens
EVLDQVER

SEQ ID NO: 5268 - protein, 8 aa, Homo sapiens
EVLDQVER

SEQ ID NO: 5269 - protein, 14 aa, Homo sapiens
GPSAAFAPAAAEPK

SEQ ID NO: 5270 - protein, 14 aa, Homo sapiens
GPSAAFAPAAAEPK

SEQ ID NO: 5271 - protein, 14 aa, Homo sapiens
GPSAAFAPAAAEPK

SEQ ID NO: 5272 - protein, 14 aa, Homo sapiens
GPSAAFAPAAAEPK

SEQ ID NO: 5273 - protein, 16 aa, Homo sapiens
LFGGFNSSDTVTSPQR

SEQ ID NO: 5274 - protein, 16 aa, Homo sapiens
LFGGFNSSDTVTSPQR

SEQ ID NO: 5275 - protein, 16 aa, Homo sapiens
LFGGFNSSDTVTSPQR

SEQ ID NO: 5276 - protein, 16 aa, Homo sapiens
LFGGFNSSDTVTSPQR

SEQ ID NO: 5277 - protein, 9 aa, Homo sapiens
LLLNAENPR

SEQ ID NO: 5278 - protein, 9 aa, Homo sapiens
LLLNAENPR

SEQ ID NO: 5279 - protein, 9 aa, Homo sapiens
LLLNAENPR

SEQ ID NO: 5280 - protein, 9 aa, Homo sapiens
LLLNAENPR

SEQ ID NO: 5281 - protein, 15 aa, Homo sapiens
TQFNSLQQLVAYYSK

SEQ ID NO: 5282 - protein, 15 aa, Homo sapiens
TQFNSLQQLVAYYSK

SEQ ID NO: 5283 - protein, 15 aa, Homo sapiens
TQFNSLQQLVAYYSK

SEQ ID NO: 5284 - protein, 15 aa, Homo sapiens
TQFNSLQQLVAYYSK

SEQ ID NO: 5285 - protein, 29 aa, Homo sapiens
GTWNGPWVSTEVLAAAIGLVIYYLAFSAK

SEQ ID NO: 5286 - protein, 19 aa, Homo sapiens
NNEDISIIPPLFTVSVDHR

SEQ ID NO: 5287 - protein, 19 aa, Homo sapiens
NNEDISIIPPLFTVSVDHR

SEQ ID NO: 5288 - protein, 19 aa, Homo sapiens
NNEDISIIPPLFTVSVDHR

SEQ ID NO: 5289 - protein, 19 aa, Homo sapiens
NNEDISIIPPLFTVSVDHR

SEQ ID NO: 5290 - protein, 6 aa, Homo sapiens
QFPVTR

SEQ ID NO: 5291 - protein, 10 aa, Homo sapiens
SAHAGTYEVR

SEQ ID NO: 5292 - protein, 10 aa, Homo sapiens
SAHAGTYEVR

SEQ ID NO: 5293 - protein, 10 aa, Homo sapiens
SAHAGTYEVR

SEQ ID NO: 5294 - protein, 10 aa, Homo sapiens
SAHAGTYEVR

SEQ ID NO: 5295 - protein, 10 aa, Homo sapiens
YQVSWSLDHK

SEQ ID NO: 5296 - protein, 10 aa, Homo sapiens
YQVSWSLDHK

SEQ ID NO: 5297 - protein, 10 aa, Homo sapiens
YQVSWSLDHK

SEQ ID NO: 5298 - protein, 10 aa, Homo sapiens
YQVSWSLDHK

SEQ ID NO: 5299 - protein, 17 aa, Homo sapiens
FNQAQSGNIQSTVMLDK

SEQ ID NO: 5300 - protein, 17 aa, Homo sapiens
FNQAQSGNIQSTVMLDK

SEQ ID NO: 5301 - protein, 17 aa, Homo sapiens
FNQAQSGNIQSTVMLDK

SEQ ID NO: 5302 - protein, 16 aa, Homo sapiens
LLGPNASPDGLIPWTR

SEQ ID NO: 5303 - protein, 16 aa, Homo sapiens
LLGPNASPDGLIPWTR

SEQ ID NO: 5304 - protein, 16 aa, Homo sapiens
LLGPNASPDGLIPWTR

SEQ ID NO: 5305 - protein, 16 aa, Homo sapiens
LLGPNASPDGLIPWTR

SEQ ID NO: 5306 - protein, 13 aa, Homo sapiens
TELISVSEVHPSR

SEQ ID NO: 5307 - protein, 13 aa, Homo sapiens
TELISVSEVHPSR

SEQ ID NO: 5308 - protein, 13 aa, Homo sapiens
TELISVSEVHPSR

SEQ ID NO: 5309 - protein, 13 aa, Homo sapiens
TELISVSEVHPSR

SEQ ID NO: 5310 - protein, 13 aa, Homo sapiens
VMAAENIPENPLK

SEQ ID NO: 5311 - protein, 13 aa, Homo sapiens
VMAAENIPENPLK

SEQ ID NO: 5312 - protein, 13 aa, Homo sapiens
VMAAENIPENPLK

SEQ ID NO: 5313 - protein, 13 aa, Homo sapiens
VMAAENIPENPLK

SEQ ID NO: 5314 - protein, 10 aa, Homo sapiens
YTYEHDPITK

SEQ ID NO: 5315 - protein, 10 aa, Homo sapiens
YTYEHDPITK

SEQ ID NO: 5316 - protein, 10 aa, Homo sapiens
YTYEHDPITK

SEQ ID NO: 5317 - protein, 10 aa, Homo sapiens
YTYEHDPITK

SEQ ID NO: 5318 - protein, 10 aa, Homo sapiens
YTYEHDPITK

SEQ ID NO: 5319 - protein, 10 aa, Homo sapiens
YTYEHDPITK

SEQ ID NO: 5320 - protein, 10 aa, Homo sapiens
YTYEHDPITK

SEQ ID NO: 5321 - protein, 10 aa, Homo sapiens
YTYEHDPITK

SEQ ID NO: 5322 - protein, 14 aa, Homo sapiens
AILSTKPPGTFLLR

SEQ ID NO: 5323 - protein, 14 aa, Homo sapiens
AILSTKPPGTFLLR

SEQ ID NO: 5324 - protein, 14 aa, Homo sapiens
AILSTKPPGTFLLR

SEQ ID NO: 5325 - protein, 14 aa, Homo sapiens
AILSTKPPGTFLLR

SEQ ID NO: 5326 - protein, 21 aa, Homo sapiens
ESHATLVFHNLLGEIDQQYSR

SEQ ID NO: 5327 - protein, 21 aa, Homo sapiens
ESHATLVFHNLLGEIDQQYSR

SEQ ID NO: 5328 - protein, 21 aa, Homo sapiens
ESHATLVFHNLLGEIDQQYSR

SEQ ID NO: 5329 - protein, 21 aa, Homo sapiens
ESHATLVFHNLLGEIDQQYSR

SEQ ID NO: 5330 - protein, 16 aa, Homo sapiens
LENWITSLAESQLQTR

SEQ ID NO: 5331 - protein, 16 aa, Homo sapiens
LENWITSLAESQLQTR

SEQ ID NO: 5332 - protein, 16 aa, Homo sapiens
LENWITSLAESQLQTR

SEQ ID NO: 5333 - protein, 16 aa, Homo sapiens
LENWITSLAESQLQTR

SEQ ID NO: 5334 - protein, 26 aa, Homo sapiens
LLQTAATAAQQGGQANHPTAAVVTEK

SEQ ID NO: 5335 - protein, 14 aa, Homo sapiens
VVENLQDDFDFNYK

SEQ ID NO: 5336 - protein, 14 aa, Homo sapiens
VVENLQDDFDFNYK

SEQ ID NO: 5337 - protein, 14 aa, Homo sapiens
VVENLQDDFDFNYK

SEQ ID NO: 5338 - protein, 14 aa, Homo sapiens
VVENLQDDFDFNYK

SEQ ID NO: 5339 - protein, 8 aa, Homo sapiens
SFLYSAAK

SEQ ID NO: 5340 - protein, 8 aa, Homo sapiens
SFLYSAAK

SEQ ID NO: 5341 - protein, 8 aa, Homo sapiens
SFLYSAAK

SEQ ID NO: 5342 - protein, 8 aa, Homo sapiens
SFLYSAAK

SEQ ID NO: 5343 - protein, 11 aa, Homo sapiens
VAAQNSAEVVR

SEQ ID NO: 5344 - protein, 11 aa, Homo sapiens
VAAQNSAEVVR

SEQ ID NO: 5345 - protein, 11 aa, Homo sapiens
VAAQNSAEVVR

SEQ ID NO: 5346 - protein, 11 aa, Homo sapiens
VAAQNSAEVVR

SEQ ID NO: 5347 - protein, 12 aa, Homo sapiens
ENDYYTPTGEFR

SEQ ID NO: 5348 - protein, 12 aa, Homo sapiens
ENDYYTPTGEFR

SEQ ID NO: 5349 - protein, 12 aa, Homo sapiens
ENDYYTPTGEFR

SEQ ID NO: 5350 - protein, 12 aa, Homo sapiens
ENDYYTPTGEFR

SEQ ID NO: 5351 - protein, 15 aa, Homo sapiens
FESVIHEFDPYFNYR

SEQ ID NO: 5352 - protein, 15 aa, Homo sapiens
FESVIHEFDPYFNYR

SEQ ID NO: 5353 - protein, 15 aa, Homo sapiens
FESVIHEFDPYFNYR

SEQ ID NO: 5354 - protein, 15 aa, Homo sapiens
FESVIHEFDPYFNYR

SEQ ID NO: 5355 - protein, 9 aa, Homo sapiens
FLAEEGFYK

SEQ ID NO: 5356 - protein, 9 aa, Homo sapiens
FLAEEGFYK

SEQ ID NO: 5357 - protein, 9 aa, Homo sapiens
FLAEEGFYK

SEQ ID NO: 5358 - protein, 9 aa, Homo sapiens
FLAEEGFYK

SEQ ID NO: 5359 - protein, 11 aa, Homo sapiens
FYSLLDPSYAK

SEQ ID NO: 5360 - protein, 11 aa, Homo sapiens
FYSLLDPSYAK

SEQ ID NO: 5361 - protein, 11 aa, Homo sapiens
FYSLLDPSYAK

SEQ ID NO: 5362 - protein, 11 aa, Homo sapiens
FYSLLDPSYAK

SEQ ID NO: 5363 - protein, 7 aa, Homo sapiens
IIFDDFR

SEQ ID NO: 5364 - protein, 7 aa, Homo sapiens
IIFDDFR

SEQ ID NO: 5365 - protein, 7 aa, Homo sapiens
IIFDDFR

SEQ ID NO: 5366 - protein, 7 aa, Homo sapiens
IIFDDFR

SEQ ID NO: 5367 - protein, 9 aa, Homo sapiens
AAEDYGVIK

SEQ ID NO: 5368 - protein, 9 aa, Homo sapiens
AAEDYGVIK

SEQ ID NO: 5369 - protein, 9 aa, Homo sapiens
AAEDYGVIK

SEQ ID NO: 5370 - protein, 9 aa, Homo sapiens
AAEDYGVIK

SEQ ID NO: 5371 - protein, 8 aa, Homo sapiens
LGFQVWLK

SEQ ID NO: 5372 - protein, 8 aa, Homo sapiens
LGFQVWLK

SEQ ID NO: 5373 - protein, 8 aa, Homo sapiens
LGFQVWLK

SEQ ID NO: 5374 - protein, 8 aa, Homo sapiens
LGFQVWLK

SEQ ID NO: 5375 - protein, 14 aa, Homo sapiens
LVNSLYPDGSKPVK

SEQ ID NO: 5376 - protein, 14 aa, Homo sapiens
LVNSLYPDGSKPVK

SEQ ID NO: 5377 - protein, 14 aa, Homo sapiens
LVNSLYPDGSKPVK

SEQ ID NO: 5378 - protein, 14 aa, Homo sapiens
LVNSLYPDGSKPVK

SEQ ID NO: 5379 - protein, 6 aa, Homo sapiens
NDGHYR

SEQ ID NO: 5380 - protein, 6 aa, Homo sapiens
NDGHYR

SEQ ID NO: 5381 - protein, 6 aa, Homo sapiens
NDGHYR

SEQ ID NO: 5382 - protein, 6 aa, Homo sapiens
NDGHYR

SEQ ID NO: 5383 - protein, 7 aa, Homo sapiens
NGVILSK

SEQ ID NO: 5384 - protein, 7 aa, Homo sapiens
NGVILSK

SEQ ID NO: 5385 - protein, 7 aa, Homo sapiens
NGVILSK

SEQ ID NO: 5386 - protein, 7 aa, Homo sapiens
NGVILSK

SEQ ID NO: 5387 - protein, 8 aa, Homo sapiens
AGSEVISR

SEQ ID NO: 5388 - protein, 8 aa, Homo sapiens
AGSEVISR

SEQ ID NO: 5389 - protein, 8 aa, Homo sapiens
AGSEVISR

SEQ ID NO: 5390 - protein, 8 aa, Homo sapiens
AGSEVISR

SEQ ID NO: 5391 - protein, 10 aa, Homo sapiens
ASSTQQEISR

SEQ ID NO: 5392 - protein, 10 aa, Homo sapiens
ASSTQQEISR

SEQ ID NO: 5393 - protein, 10 aa, Homo sapiens
ASSTQQEISR

SEQ ID NO: 5394 - protein, 10 aa, Homo sapiens
ASSTQQEISR

SEQ ID NO: 5395 - protein, 11 aa, Homo sapiens
LQGEAPQSALR

SEQ ID NO: 5396 - protein, 11 aa, Homo sapiens
LQGEAPQSALR

SEQ ID NO: 5397 - protein, 11 aa, Homo sapiens
LQGEAPQSALR

SEQ ID NO: 5398 - protein, 9 aa, Homo sapiens
LSEEIDQLR

SEQ ID NO: 5399 - protein, 9 aa, Homo sapiens
LSEEIDQLR

SEQ ID NO: 5400 - protein, 9 aa, Homo sapiens
LSEEIDQLR

SEQ ID NO: 5401 - protein, 9 aa, Homo sapiens
LSEEIDQLR

SEQ ID NO: 5402 - protein, 12 aa, Homo sapiens
YQDVYVELSHIK

SEQ ID NO: 5403 - protein, 12 aa, Homo sapiens
YQDVYVELSHIK

SEQ ID NO: 5404 - protein, 12 aa, Homo sapiens
YQDVYVELSHIK

SEQ ID NO: 5405 - protein, 12 aa, Homo sapiens
YQDVYVELSHIK

SEQ ID NO: 5406 - protein, 15 aa, Homo sapiens
AVFVDLEPTVIDEVR

SEQ ID NO: 5407 - protein, 15 aa, Homo sapiens
AVFVDLEPTVIDEVR

SEQ ID NO: 5408 - protein, 15 aa, Homo sapiens
AVFVDLEPTVIDEVR

SEQ ID NO: 5409 - protein, 15 aa, Homo sapiens
AVFVDLEPTVIDEVR

SEQ ID NO: 5410 - protein, 9 aa, Homo sapiens
EIIDLVLDR

SEQ ID NO: 5411 - protein, 9 aa, Homo sapiens
EIIDLVLDR

SEQ ID NO: 5412 - protein, 9 aa, Homo sapiens
EIIDLVLDR

SEQ ID NO: 5413 - protein, 9 aa, Homo sapiens
EIIDLVLDR

SEQ ID NO: 5414 - protein, 15 aa, Homo sapiens
AILVDLEPGTMDSVR

SEQ ID NO: 5415 - protein, 15 aa, Homo sapiens
AILVDLEPGTMDSVR

SEQ ID NO: 5416 - protein, 15 aa, Homo sapiens
AILVDLEPGTMDSVR

SEQ ID NO: 5417 - protein, 15 aa, Homo sapiens
AILVDLEPGTMDSVR

SEQ ID NO: 5418 - protein, 12 aa, Homo sapiens
EVDEQMLNVQNK

SEQ ID NO: 5419 - protein, 12 aa, Homo sapiens
EVDEQMLNVQNK

SEQ ID NO: 5420 - protein, 12 aa, Homo sapiens
EVDEQMLNVQNK

SEQ ID NO: 5421 - protein, 12 aa, Homo sapiens
EVDEQMLNVQNK

SEQ ID NO: 5422 - protein, 10 aa, Homo sapiens
FPGQLNADLR

SEQ ID NO: 5423 - protein, 10 aa, Homo sapiens
FPGQLNADLR

SEQ ID NO: 5424 - protein, 10 aa, Homo sapiens
FPGQLNADLR

SEQ ID NO: 5425 - protein, 10 aa, Homo sapiens
FPGQLNADLR

SEQ ID NO: 5426 - protein, 18 aa, Homo sapiens
GHYTEGAELVDSVLDVVR

SEQ ID NO: 5427 - protein, 18 aa, Homo sapiens
GHYTEGAELVDSVLDVVR

SEQ ID NO: 5428 - protein, 18 aa, Homo sapiens
GHYTEGAELVDSVLDVVR

SEQ ID NO: 5429 - protein, 18 aa, Homo sapiens
GHYTEGAELVDSVLDVVR

SEQ ID NO: 5430 - protein, 10 aa, Homo sapiens
ISEQFTAMFR

SEQ ID NO: 5431 - protein, 10 aa, Homo sapiens
ISEQFTAMFR

SEQ ID NO: 5432 - protein, 10 aa, Homo sapiens
ISEQFTAMFR

SEQ ID NO: 5433 - protein, 10 aa, Homo sapiens
ISEQFTAMFR

SEQ ID NO: 5434 - protein, 10 aa, Homo sapiens
LAVNMVPFPR

SEQ ID NO: 5435 - protein, 10 aa, Homo sapiens
LAVNMVPFPR

SEQ ID NO: 5436 - protein, 10 aa, Homo sapiens
LAVNMVPFPR

SEQ ID NO: 5437 - protein, 10 aa, Homo sapiens
LAVNMVPFPR

SEQ ID NO: 5438 - protein, 14 aa, Homo sapiens
LHFFMPGFAPLTSR

SEQ ID NO: 5439 - protein, 14 aa, Homo sapiens
LHFFMPGFAPLTSR

SEQ ID NO: 5440 - protein, 14 aa, Homo sapiens
LHFFMPGFAPLTSR

SEQ ID NO: 5441 - protein, 14 aa, Homo sapiens
LHFFMPGFAPLTSR

SEQ ID NO: 5442 - protein, 17 aa, Homo sapiens
MSATFIGNSTAIQELFK

SEQ ID NO: 5443 - protein, 14 aa, Homo sapiens
NSSYFVEWIPNNVK

SEQ ID NO: 5444 - protein, 14 aa, Homo sapiens
NSSYFVEWIPNNVK

SEQ ID NO: 5445 - protein, 14 aa, Homo sapiens
NSSYFVEWIPNNVK

SEQ ID NO: 5446 - protein, 14 aa, Homo sapiens
NSSYFVEWIPNNVK

SEQ ID NO: 5447 - protein, 26 aa, Homo sapiens
SGPFGQIFRPDNFVFGQSGAGNNWAK

SEQ ID NO: 5448 - protein, 26 aa, Homo sapiens
SGPFGQIFRPDNFVFGQSGAGNNWAK

SEQ ID NO: 5449 - protein, 26 aa, Homo sapiens
SGPFGQIFRPDNFVFGQSGAGNNWAK

SEQ ID NO: 5450 - protein, 26 aa, Homo sapiens
SGPFGQIFRPDNFVFGQSGAGNNWAK

SEQ ID NO: 5451 - protein, 15 aa, Homo sapiens
ALTVPELTQQMFDAK

SEQ ID NO: 5452 - protein, 15 aa, Homo sapiens
ALTVPELTQQMFDAK

SEQ ID NO: 5453 - protein, 15 aa, Homo sapiens
ALTVPELTQQMFDAK

SEQ ID NO: 5454 - protein, 12 aa, Homo sapiens
EVDEQMLAIQSK

SEQ ID NO: 5455 - protein, 12 aa, Homo sapiens
EVDEQMLAIQSK

SEQ ID NO: 5456 - protein, 12 aa, Homo sapiens
EVDEQMLAIQSK

SEQ ID NO: 5457 - protein, 12 aa, Homo sapiens
EVDEQMLAIQSK

SEQ ID NO: 5458 - protein, 12 aa, Homo sapiens
ISVYYNEASSHK

SEQ ID NO: 5459 - protein, 12 aa, Homo sapiens
ISVYYNEASSHK

SEQ ID NO: 5460 - protein, 12 aa, Homo sapiens
ISVYYNEASSHK

SEQ ID NO: 5461 - protein, 12 aa, Homo sapiens
ISVYYNEASSHK

SEQ ID NO: 5462 - protein, 12 aa, Homo sapiens
ISVYYNEASSHK

SEQ ID NO: 5463 - protein, 12 aa, Homo sapiens
ISVYYNEASSHK

SEQ ID NO: 5464 - protein, 12 aa, Homo sapiens
ISVYYNEASSHK

SEQ ID NO: 5465 - protein, 12 aa, Homo sapiens
ISVYYNEASSHK

SEQ ID NO: 5466 - protein, 17 aa, Homo sapiens
MSSTFIGNSTAIQELFK

SEQ ID NO: 5467 - protein, 17 aa, Homo sapiens
MSSTFIGNSTAIQELFK

SEQ ID NO: 5468 - protein, 17 aa, Homo sapiens
MSSTFIGNSTAIQELFK

SEQ ID NO: 5469 - protein, 17 aa, Homo sapiens
MSSTFIGNSTAIQELFK

SEQ ID NO: 5470 - protein, 9 aa, Homo sapiens
YLTVATVFR

SEQ ID NO: 5471 - protein, 9 aa, Homo sapiens
YLTVATVFR

SEQ ID NO: 5472 - protein, 9 aa, Homo sapiens
YLTVATVFR

SEQ ID NO: 5473 - protein, 9 aa, Homo sapiens
YLTVATVFR

SEQ ID NO: 5474 - protein, 15 aa, Homo sapiens
AILVDLEPGTMDSVR

SEQ ID NO: 5475 - protein, 15 aa, Homo sapiens
AILVDLEPGTMDSVR

SEQ ID NO: 5476 - protein, 15 aa, Homo sapiens
AILVDLEPGTMDSVR

SEQ ID NO: 5477 - protein, 15 aa, Homo sapiens
AILVDLEPGTMDSVR

SEQ ID NO: 5478 - protein, 10 aa, Homo sapiens
FPGQLNADLR

SEQ ID NO: 5479 - protein, 10 aa, Homo sapiens
FPGQLNADLR

SEQ ID NO: 5480 - protein, 10 aa, Homo sapiens
FPGQLNADLR

SEQ ID NO: 5481 - protein, 10 aa, Homo sapiens
FPGQLNADLR

SEQ ID NO: 5482 - protein, 18 aa, Homo sapiens
GHYTEGAELVDSVLDVVR

SEQ ID NO: 5483 - protein, 18 aa, Homo sapiens
GHYTEGAELVDSVLDVVR

SEQ ID NO: 5484 - protein, 18 aa, Homo sapiens
GHYTEGAELVDSVLDVVR

SEQ ID NO: 5485 - protein, 18 aa, Homo sapiens
GHYTEGAELVDSVLDVVR

SEQ ID NO: 5486 - protein, 12 aa, Homo sapiens
IMNTFSVVPSPK

SEQ ID NO: 5487 - protein, 10 aa, Homo sapiens
ISEQFTAMFR

SEQ ID NO: 5488 - protein, 10 aa, Homo sapiens
ISEQFTAMFR

SEQ ID NO: 5489 - protein, 10 aa, Homo sapiens
ISEQFTAMFR

SEQ ID NO: 5490 - protein, 10 aa, Homo sapiens
ISEQFTAMFR

SEQ ID NO: 5491 - protein, 10 aa, Homo sapiens
LAVNMVPFPR

SEQ ID NO: 5492 - protein, 10 aa, Homo sapiens
LAVNMVPFPR

SEQ ID NO: 5493 - protein, 10 aa, Homo sapiens
LAVNMVPFPR

SEQ ID NO: 5494 - protein, 10 aa, Homo sapiens
LAVNMVPFPR

SEQ ID NO: 5495 - protein, 14 aa, Homo sapiens
LHFFMPGFAPLTSR

SEQ ID NO: 5496 - protein, 14 aa, Homo sapiens
LHFFMPGFAPLTSR

SEQ ID NO: 5497 - protein, 14 aa, Homo sapiens
LHFFMPGFAPLTSR

SEQ ID NO: 5498 - protein, 14 aa, Homo sapiens
LHFFMPGFAPLTSR

SEQ ID NO: 5499 - protein, 17 aa, Homo sapiens
MAVTFIGNSTAIQELFK

SEQ ID NO: 5500 - protein, 14 aa, Homo sapiens
NSSYFVEWIPNNVK

SEQ ID NO: 5501 - protein, 14 aa, Homo sapiens
NSSYFVEWIPNNVK

SEQ ID NO: 5502 - protein, 14 aa, Homo sapiens
NSSYFVEWIPNNVK

SEQ ID NO: 5503 - protein, 14 aa, Homo sapiens
NSSYFVEWIPNNVK

SEQ ID NO: 5504 - protein, 9 aa, Homo sapiens
YLTVAAVFR

SEQ ID NO: 5505 - protein, 9 aa, Homo sapiens
YLTVAAVFR

SEQ ID NO: 5506 - protein, 9 aa, Homo sapiens
YLTVAAVFR

SEQ ID NO: 5507 - protein, 9 aa, Homo sapiens
YLTVAAVFR

SEQ ID NO: 5508 - protein, 11 aa, Homo sapiens
FATEAAITILR

SEQ ID NO: 5509 - protein, 11 aa, Homo sapiens
FATEAAITILR

SEQ ID NO: 5510 - protein, 11 aa, Homo sapiens
FATEAAITILR

SEQ ID NO: 5511 - protein, 11 aa, Homo sapiens
FATEAAITILR

SEQ ID NO: 5512 - protein, 11 aa, Homo sapiens
IHPTSVISGYR

SEQ ID NO: 5513 - protein, 11 aa, Homo sapiens
IHPTSVISGYR

SEQ ID NO: 5514 - protein, 11 aa, Homo sapiens
IHPTSVISGYR

SEQ ID NO: 5515 - protein, 11 aa, Homo sapiens
IHPTSVISGYR

SEQ ID NO: 5516 - protein, 12 aa, Homo sapiens
LGVQVVITDPEK

SEQ ID NO: 5517 - protein, 10 aa, Homo sapiens
SSLGPVGLDK

SEQ ID NO: 5518 - protein, 10 aa, Homo sapiens
SSLGPVGLDK

SEQ ID NO: 5519 - protein, 10 aa, Homo sapiens
SSLGPVGLDK

SEQ ID NO: 5520 - protein, 10 aa, Homo sapiens
SSLGPVGLDK

SEQ ID NO: 5521 - protein, 15 aa, Homo sapiens
YINENLIVNTDELGR

SEQ ID NO: 5522 - protein, 8 aa, Homo sapiens
AYILNLVK

SEQ ID NO: 5523 - protein, 8 aa, Homo sapiens
AYILNLVK

SEQ ID NO: 5524 - protein, 8 aa, Homo sapiens
AYILNLVK

SEQ ID NO: 5525 - protein, 8 aa, Homo sapiens
AYILNLVK

SEQ ID NO: 5526 - protein, 14 aa, Homo sapiens
GDVTITNDGATILK

SEQ ID NO: 5527 - protein, 13 aa, Homo sapiens
GIHPTIISESFQK

SEQ ID NO: 5528 - protein, 13 aa, Homo sapiens
GIHPTIISESFQK

SEQ ID NO: 5529 - protein, 13 aa, Homo sapiens
GIHPTIISESFQK

SEQ ID NO: 5530 - protein, 13 aa, Homo sapiens
GIHPTIISESFQK

SEQ ID NO: 5531 - protein, 8 aa, Homo sapiens
IDDVVNTR

SEQ ID NO: 5532 - protein, 8 aa, Homo sapiens
IDDVVNTR

SEQ ID NO: 5533 - protein, 8 aa, Homo sapiens
IDDVVNTR

SEQ ID NO: 5534 - protein, 8 aa, Homo sapiens
IDDVVNTR

SEQ ID NO: 5535 - protein, 13 aa, Homo sapiens
VIDPATATSVDLR

SEQ ID NO: 5536 - protein, 13 aa, Homo sapiens
VIDPATATSVDLR

SEQ ID NO: 5537 - protein, 13 aa, Homo sapiens
VIDPATATSVDLR

SEQ ID NO: 5538 - protein, 13 aa, Homo sapiens
VIDPATATSVDLR

SEQ ID NO: 5539 - protein, 10 aa, Homo sapiens
AVDDGVNTFK

SEQ ID NO: 5540 - protein, 10 aa, Homo sapiens
AVDDGVNTFK

SEQ ID NO: 5541 - protein, 10 aa, Homo sapiens
AVDDGVNTFK

SEQ ID NO: 5542 - protein, 10 aa, Homo sapiens
AVDDGVNTFK

SEQ ID NO: 5543 - protein, 10 aa, Homo sapiens
DIDEVSSLLR

SEQ ID NO: 5544 - protein, 10 aa, Homo sapiens
DIDEVSSLLR

SEQ ID NO: 5545 - protein, 10 aa, Homo sapiens
DIDEVSSLLR

SEQ ID NO: 5546 - protein, 10 aa, Homo sapiens
DIDEVSSLLR

SEQ ID NO: 5547 - protein, 11 aa, Homo sapiens
LATNAAVTVLR

SEQ ID NO: 5548 - protein, 11 aa, Homo sapiens
LATNAAVTVLR

SEQ ID NO: 5549 - protein, 11 aa, Homo sapiens
LATNAAVTVLR

SEQ ID NO: 5550 - protein, 11 aa, Homo sapiens
LATNAAVTVLR

SEQ ID NO: 5551 - protein, 10 aa, Homo sapiens
LYAVHQEGNK

SEQ ID NO: 5552 - protein, 10 aa, Homo sapiens
LYAVHQEGNK

SEQ ID NO: 5553 - protein, 10 aa, Homo sapiens
LYAVHQEGNK

SEQ ID NO: 5554 - protein, 10 aa, Homo sapiens
LYAVHQEGNK

SEQ ID NO: 5555 - protein, 14 aa, Homo sapiens
NVGLDIEAEVPAVK

SEQ ID NO: 5556 - protein, 14 aa, Homo sapiens
NVGLDIEAEVPAVK

SEQ ID NO: 5557 - protein, 14 aa, Homo sapiens
NVGLDIEAEVPAVK

SEQ ID NO: 5558 - protein, 14 aa, Homo sapiens
NVGLDIEAEVPAVK

SEQ ID NO: 5559 - protein, 9 aa, Homo sapiens
ALQFLEEVK

SEQ ID NO: 5560 - protein, 9 aa, Homo sapiens
ALQFLEEVK

SEQ ID NO: 5561 - protein, 9 aa, Homo sapiens
ALQFLEEVK

SEQ ID NO: 5562 - protein, 9 aa, Homo sapiens
ALQFLEEVK

SEQ ID NO: 5563 - protein, 13 aa, Homo sapiens
AQAALAVNISAAR

SEQ ID NO: 5564 - protein, 13 aa, Homo sapiens
AQAALAVNISAAR

SEQ ID NO: 5565 - protein, 13 aa, Homo sapiens
AQAALAVNISAAR

SEQ ID NO: 5566 - protein, 13 aa, Homo sapiens
AQAALAVNISAAR

SEQ ID NO: 5567 - protein, 17 aa, Homo sapiens
AQLGVQAFADALLIIPK

SEQ ID NO: 5568 - protein, 17 aa, Homo sapiens
AQLGVQAFADALLIIPK

SEQ ID NO: 5569 - protein, 17 aa, Homo sapiens
AQLGVQAFADALLIIPK

SEQ ID NO: 5570 - protein, 17 aa, Homo sapiens
AQLGVQAFADALLIIPK

SEQ ID NO: 5571 - protein, 12 aa, Homo sapiens
GIDPFSLDALSK

SEQ ID NO: 5572 - protein, 12 aa, Homo sapiens
GIDPFSLDALSK

SEQ ID NO: 5573 - protein, 12 aa, Homo sapiens
GIDPFSLDALSK

SEQ ID NO: 5574 - protein, 12 aa, Homo sapiens
GIDPFSLDALSK

SEQ ID NO: 5575 - protein, 9 aa, Homo sapiens
GLVLDHGAR

SEQ ID NO: 5576 - protein, 9 aa, Homo sapiens
GLVLDHGAR

SEQ ID NO: 5577 - protein, 9 aa, Homo sapiens
GLVLDHGAR

SEQ ID NO: 5578 - protein, 13 aa, Homo sapiens
QADLYISEGLHPR

SEQ ID NO: 5579 - protein, 13 aa, Homo sapiens
QADLYISEGLHPR

SEQ ID NO: 5580 - protein, 13 aa, Homo sapiens
QADLYISEGLHPR

SEQ ID NO: 5581 - protein, 13 aa, Homo sapiens
QADLYISEGLHPR

SEQ ID NO: 5582 - protein, 10 aa, Homo sapiens
TEVNSGFFYK

SEQ ID NO: 5583 - protein, 10 aa, Homo sapiens
TEVNSGFFYK

SEQ ID NO: 5584 - protein, 10 aa, Homo sapiens
TEVNSGFFYK

SEQ ID NO: 5585 - protein, 10 aa, Homo sapiens
TEVNSGFFYK

SEQ ID NO: 5586 - protein, 25 aa, Homo sapiens
VATAQDDITGDGTTSNVLIIGELLK

SEQ ID NO: 5587 - protein, 21 aa, Homo sapiens
VHAELADVLTEAVVDSILAIK

SEQ ID NO: 5588 - protein, 21 aa, Homo sapiens
VHAELADVLTEAVVDSILAIK

SEQ ID NO: 5589 - protein, 21 aa, Homo sapiens
VHAELADVLTEAVVDSILAIK

SEQ ID NO: 5590 - protein, 21 aa, Homo sapiens
VHAELADVLTEAVVDSILAIK

SEQ ID NO: 5591 - protein, 16 aa, Homo sapiens
VLAQNSGFDLQETLVK

SEQ ID NO: 5592 - protein, 16 aa, Homo sapiens
VLAQNSGFDLQETLVK

SEQ ID NO: 5593 - protein, 16 aa, Homo sapiens
VLAQNSGFDLQETLVK

SEQ ID NO: 5594 - protein, 16 aa, Homo sapiens
VLAQNSGFDLQETLVK

SEQ ID NO: 5595 - protein, 13 aa, Homo sapiens
HFNVNTDYQNPVR

SEQ ID NO: 5596 - protein, 13 aa, Homo sapiens
HFNVNTDYQNPVR

SEQ ID NO: 5597 - protein, 13 aa, Homo sapiens
HFNVNTDYQNPVR

SEQ ID NO: 5598 - protein, 13 aa, Homo sapiens
HFNVNTDYQNPVR

SEQ ID NO: 5599 - protein, 25 aa, Homo sapiens
SEDEEDLGNARPSAPSTLFDFLESK

SEQ ID NO: 5600 - protein, 25 aa, Homo sapiens
SEDEEDLGNARPSAPSTLFDFLESK

SEQ ID NO: 5601 - protein, 25 aa, Homo sapiens
SEDEEDLGNARPSAPSTLFDFLESK

SEQ ID NO: 5602 - protein, 25 aa, Homo sapiens
SEDEEDLGNARPSAPSTLFDFLESK

SEQ ID NO: 5603 - protein, 18 aa, Homo sapiens
SNIGTEGGPPPFVPFGQK

SEQ ID NO: 5604 - protein, 18 aa, Homo sapiens
SNIGTEGGPPPFVPFGQK

SEQ ID NO: 5605 - protein, 18 aa, Homo sapiens
SNIGTEGGPPPFVPFGQK

SEQ ID NO: 5606 - protein, 18 aa, Homo sapiens
SNIGTEGGPPPFVPFGQK

SEQ ID NO: 5607 - protein, 10 aa, Homo sapiens
SVLEGSGLPR

SEQ ID NO: 5608 - protein, 10 aa, Homo sapiens
SVLEGSGLPR

SEQ ID NO: 5609 - protein, 10 aa, Homo sapiens
SVLEGSGLPR

SEQ ID NO: 5610 - protein, 10 aa, Homo sapiens
SVLEGSGLPR

SEQ ID NO: 5611 - protein, 9 aa, Homo sapiens
TAAIAEVAK

SEQ ID NO: 5612 - protein, 9 aa, Homo sapiens
TAAIAEVAK

SEQ ID NO: 5613 - protein, 9 aa, Homo sapiens
TAAIAEVAK

SEQ ID NO: 5614 - protein, 9 aa, Homo sapiens
TAAIAEVAK

SEQ ID NO: 5615 - protein, 14 aa, Homo sapiens
AVDIPGLEAATPYR

SEQ ID NO: 5616 - protein, 14 aa, Homo sapiens
AVDIPGLEAATPYR

SEQ ID NO: 5617 - protein, 14 aa, Homo sapiens
AVDIPGLEAATPYR

SEQ ID NO: 5618 - protein, 14 aa, Homo sapiens
AVDIPGLEAATPYR

SEQ ID NO: 5619 - protein, 16 aa, Homo sapiens
GLEPGQEYNVLLTAEK

SEQ ID NO: 5620 - protein, 16 aa, Homo sapiens
GLEPGQEYNVLLTAEK

SEQ ID NO: 5621 - protein, 16 aa, Homo sapiens
GLEPGQEYNVLLTAEK

SEQ ID NO: 5622 - protein, 16 aa, Homo sapiens
GLEPGQEYNVLLTAEK

SEQ ID NO: 5623 - protein, 25 aa, Homo sapiens
TAHISGLPPSTDFIVYLSGLAPSIR

SEQ ID NO: 5624 - protein, 25 aa, Homo sapiens
TAHISGLPPSTDFIVYLSGLAPSIR

SEQ ID NO: 5625 - protein, 25 aa, Homo sapiens
TAHISGLPPSTDFIVYLSGLAPSIR

SEQ ID NO: 5626 - protein, 25 aa, Homo sapiens
TAHISGLPPSTDFIVYLSGLAPSIR

SEQ ID NO: 5627 - protein, 23 aa, Homo sapiens
TVSGNTVEYALTDLEPATEYTLR

SEQ ID NO: 5628 - protein, 23 aa, Homo sapiens
TVSGNTVEYALTDLEPATEYTLR

SEQ ID NO: 5629 - protein, 23 aa, Homo sapiens
TVSGNTVEYALTDLEPATEYTLR

SEQ ID NO: 5630 - protein, 23 aa, Homo sapiens
TVSGNTVEYALTDLEPATEYTLR

SEQ ID NO: 5631 - protein, 16 aa, Homo sapiens
YAPISGGDHAEVDVPK

SEQ ID NO: 5632 - protein, 16 aa, Homo sapiens
YAPISGGDHAEVDVPK

SEQ ID NO: 5633 - protein, 16 aa, Homo sapiens
YAPISGGDHAEVDVPK

SEQ ID NO: 5634 - protein, 16 aa, Homo sapiens
YAPISGGDHAEVDVPK

SEQ ID NO: 5635 - protein, 16 aa, Homo sapiens
DAQGQPQAVPVSGDLR

SEQ ID NO: 5636 - protein, 16 aa, Homo sapiens
DAQGQPQAVPVSGDLR

SEQ ID NO: 5637 - protein, 16 aa, Homo sapiens
DAQGQPQAVPVSGDLR

SEQ ID NO: 5638 - protein, 16 aa, Homo sapiens
DAQGQPQAVPVSGDLR

SEQ ID NO: 5639 - protein, 23 aa, Homo sapiens
GFEESEPLTGFLTTVPDGPTQLR

SEQ ID NO: 5640 - protein, 18 aa, Homo sapiens
VPGHEDGVTISGLEPDHK

SEQ ID NO: 5641 - protein, 18 aa, Homo sapiens
VPGHEDGVTISGLEPDHK

SEQ ID NO: 5642 - protein, 18 aa, Homo sapiens
VPGHEDGVTISGLEPDHK

SEQ ID NO: 5643 - protein, 18 aa, Homo sapiens
VPGHEDGVTISGLEPDHK

SEQ ID NO: 5644 - protein, 21 aa, Homo sapiens
VSYQLADGGEPQSVQVDGQAR

SEQ ID NO: 5645 - protein, 21 aa, Homo sapiens
VSYQLADGGEPQSVQVDGQAR

SEQ ID NO: 5646 - protein, 21 aa, Homo sapiens
VSYQLADGGEPQSVQVDGQAR

SEQ ID NO: 5647 - protein, 21 aa, Homo sapiens
VSYQLADGGEPQSVQVDGQAR

SEQ ID NO: 5648 - protein, 9 aa, Homo sapiens
YEVTVVSVR

SEQ ID NO: 5649 - protein, 9 aa, Homo sapiens
YEVTVVSVR

SEQ ID NO: 5650 - protein, 9 aa, Homo sapiens
YEVTVVSVR

SEQ ID NO: 5651 - protein, 9 aa, Homo sapiens
YEVTVVSVR

SEQ ID NO: 5652 - protein, 12 aa, Homo sapiens
GILLYGPPGTGK

SEQ ID NO: 5653 - protein, 12 aa, Homo sapiens
GILLYGPPGTGK

SEQ ID NO: 5654 - protein, 12 aa, Homo sapiens
GILLYGPPGTGK

SEQ ID NO: 5655 - protein, 12 aa, Homo sapiens
GILLYGPPGTGK

SEQ ID NO: 5656 - protein, 17 aa, Homo sapiens
GPELLTMWFGESEANVR

SEQ ID NO: 5657 - protein, 17 aa, Homo sapiens
GPELLTMWFGESEANVR

SEQ ID NO: 5658 - protein, 17 aa, Homo sapiens
GPELLTMWFGESEANVR

SEQ ID NO: 5659 - protein, 17 aa, Homo sapiens
GPELLTMWFGESEANVR

SEQ ID NO: 5660 - protein, 13 aa, Homo sapiens
IVSQLLTLMDGLK

SEQ ID NO: 5661 - protein, 13 aa, Homo sapiens
IVSQLLTLMDGLK

SEQ ID NO: 5662 - protein, 13 aa, Homo sapiens
IVSQLLTLMDGLK

SEQ ID NO: 5663 - protein, 13 aa, Homo sapiens
IVSQLLTLMDGLK

SEQ ID NO: 5664 - protein, 13 aa, Homo sapiens
LDQLIYIPLPDEK

SEQ ID NO: 5665 - protein, 13 aa, Homo sapiens
LDQLIYIPLPDEK

SEQ ID NO: 5666 - protein, 13 aa, Homo sapiens
LDQLIYIPLPDEK

SEQ ID NO: 5667 - protein, 13 aa, Homo sapiens
LDQLIYIPLPDEK

SEQ ID NO: 5668 - protein, 20 aa, Homo sapiens
LIVDEAINEDNSVVSLSQPK

SEQ ID NO: 5669 - protein, 8 aa, Homo sapiens
MDELQLFR

SEQ ID NO: 5670 - protein, 8 aa, Homo sapiens
MDELQLFR

SEQ ID NO: 5671 - protein, 8 aa, Homo sapiens
MDELQLFR

SEQ ID NO: 5672 - protein, 8 aa, Homo sapiens
MDELQLFR

SEQ ID NO: 5673 - protein, 17 aa, Homo sapiens
NAPAIIFIDELDAIAPK

SEQ ID NO: 5674 - protein, 17 aa, Homo sapiens
NAPAIIFIDELDAIAPK

SEQ ID NO: 5675 - protein, 17 aa, Homo sapiens
NAPAIIFIDELDAIAPK

SEQ ID NO: 5676 - protein, 17 aa, Homo sapiens
NAPAIIFIDELDAIAPK

SEQ ID NO: 5677 - protein, 15 aa, Homo sapiens
VINQILTEMDGMSTK

SEQ ID NO: 5678 - protein, 15 aa, Homo sapiens
VINQILTEMDGMSTK

SEQ ID NO: 5679 - protein, 15 aa, Homo sapiens
VINQILTEMDGMSTK

SEQ ID NO: 5680 - protein, 15 aa, Homo sapiens
VINQILTEMDGMSTK

SEQ ID NO: 5681 - protein, 12 aa, Homo sapiens
WALSQSNPSALR

SEQ ID NO: 5682 - protein, 12 aa, Homo sapiens
WALSQSNPSALR

SEQ ID NO: 5683 - protein, 12 aa, Homo sapiens
WALSQSNPSALR

SEQ ID NO: 5684 - protein, 12 aa, Homo sapiens
WALSQSNPSALR

SEQ ID NO: 5685 - protein, 21 aa, Homo sapiens
GGTLSTPQTGSENDALYEYLR

SEQ ID NO: 5686 - protein, 21 aa, Homo sapiens
GGTLSTPQTGSENDALYEYLR

SEQ ID NO: 5687 - protein, 21 aa, Homo sapiens
GGTLSTPQTGSENDALYEYLR

SEQ ID NO: 5688 - protein, 21 aa, Homo sapiens
GGTLSTPQTGSENDALYEYLR

SEQ ID NO: 5689 - protein, 12 aa, Homo sapiens
LDTLAQEVALLK

SEQ ID NO: 5690 - protein, 12 aa, Homo sapiens
LDTLAQEVALLK

SEQ ID NO: 5691 - protein, 12 aa, Homo sapiens
LDTLAQEVALLK

SEQ ID NO: 5692 - protein, 12 aa, Homo sapiens
LDTLAQEVALLK

SEQ ID NO: 5693 - protein, 14 aa, Homo sapiens
NWETEITAQPDGGK

SEQ ID NO: 5694 - protein, 14 aa, Homo sapiens
NWETEITAQPDGGK

SEQ ID NO: 5695 - protein, 14 aa, Homo sapiens
NWETEITAQPDGGK

SEQ ID NO: 5696 - protein, 14 aa, Homo sapiens
NWETEITAQPDGGK

SEQ ID NO: 5697 - protein, 10 aa, Homo sapiens
DLIYTLYYWK

SEQ ID NO: 5698 - protein, 10 aa, Homo sapiens
DLIYTLYYWK

SEQ ID NO: 5699 - protein, 10 aa, Homo sapiens
DLIYTLYYWK

SEQ ID NO: 5700 - protein, 10 aa, Homo sapiens
DLIYTLYYWK

SEQ ID NO: 5701 - protein, 8 aa, Homo sapiens
ENSPLNVS

SEQ ID NO: 5702 - protein, 21 aa, Homo sapiens
TILEWEPKPVNQVYTVQISTK

SEQ ID NO: 5703 - protein, 12 aa, Homo sapiens
TNTNEFLIDVDK

SEQ ID NO: 5704 - protein, 12 aa, Homo sapiens
TNTNEFLIDVDK

SEQ ID NO: 5705 - protein, 12 aa, Homo sapiens
TNTNEFLIDVDK

SEQ ID NO: 5706 - protein, 12 aa, Homo sapiens
TNTNEFLIDVDK

SEQ ID NO: 5707 - protein, 9 aa, Homo sapiens
VNVTVEDER

SEQ ID NO: 5708 - protein, 9 aa, Homo sapiens
VNVTVEDER

SEQ ID NO: 5709 - protein, 9 aa, Homo sapiens
VNVTVEDER

SEQ ID NO: 5710 - protein, 9 aa, Homo sapiens
VNVTVEDER

SEQ ID NO: 5711 - protein, 15 aa, Homo sapiens
GFVEPDHYVVVGAQR

SEQ ID NO: 5712 - protein, 15 aa, Homo sapiens
GFVEPDHYVVVGAQR

SEQ ID NO: 5713 - protein, 15 aa, Homo sapiens
GFVEPDHYVVVGAQR

SEQ ID NO: 5714 - protein, 15 aa, Homo sapiens
GFVEPDHYVVVGAQR

SEQ ID NO: 5715 - protein, 10 aa, Homo sapiens
LTTDFGNAEK

SEQ ID NO: 5716 - protein, 10 aa, Homo sapiens
LTTDFGNAEK

SEQ ID NO: 5717 - protein, 10 aa, Homo sapiens
LTTDFGNAEK

SEQ ID NO: 5718 - protein, 10 aa, Homo sapiens
LTTDFGNAEK

SEQ ID NO: 5719 - protein, 8 aa, Homo sapiens
LTVSNVLK

SEQ ID NO: 5720 - protein, 8 aa, Homo sapiens
LTVSNVLK

SEQ ID NO: 5721 - protein, 8 aa, Homo sapiens
LTVSNVLK

SEQ ID NO: 5722 - protein, 8 aa, Homo sapiens
LTVSNVLK

SEQ ID NO: 5723 - protein, 16 aa, Homo sapiens
SAFSNLFGGEPLSYTR

SEQ ID NO: 5724 - protein, 16 aa, Homo sapiens
SAFSNLFGGEPLSYTR

SEQ ID NO: 5725 - protein, 16 aa, Homo sapiens
SAFSNLFGGEPLSYTR

SEQ ID NO: 5726 - protein, 16 aa, Homo sapiens
SAFSNLFGGEPLSYTR

SEQ ID NO: 5727 - protein, 14 aa, Homo sapiens
SSGLPNIPVQTISR

SEQ ID NO: 5728 - protein, 14 aa, Homo sapiens
SSGLPNIPVQTISR

SEQ ID NO: 5729 - protein, 14 aa, Homo sapiens
SSGLPNIPVQTISR

SEQ ID NO: 5730 - protein, 14 aa, Homo sapiens
SSGLPNIPVQTISR

SEQ ID NO: 5731 - protein, 9 aa, Homo sapiens
HEKPSALLK

SEQ ID NO: 5732 - protein, 9 aa, Homo sapiens
HEKPSALLK

SEQ ID NO: 5733 - protein, 9 aa, Homo sapiens
HEKPSALLK

SEQ ID NO: 5734 - protein, 9 aa, Homo sapiens
HEKPSALLK

SEQ ID NO: 5735 - protein, 9 aa, Homo sapiens
DELNGFFNK

SEQ ID NO: 5736 - protein, 9 aa, Homo sapiens
DELNGFFNK

SEQ ID NO: 5737 - protein, 9 aa, Homo sapiens
DELNGFFNK

SEQ ID NO: 5738 - protein, 9 aa, Homo sapiens
DELNGFFNK

SEQ ID NO: 5739 - protein, 15 aa, Homo sapiens
HPKPSPFIGNLTFFR

SEQ ID NO: 5740 - protein, 15 aa, Homo sapiens
HPKPSPFIGNLTFFR

SEQ ID NO: 5741 - protein, 15 aa, Homo sapiens
HPKPSPFIGNLTFFR

SEQ ID NO: 5742 - protein, 15 aa, Homo sapiens
HPKPSPFIGNLTFFR

SEQ ID NO: 5743 - protein, 16 aa, Homo sapiens
QQHRPFTYLPFGAGPR

SEQ ID NO: 5744 - protein, 13 aa, Homo sapiens
QVLVENFSNFTNR

SEQ ID NO: 5745 - protein, 13 aa, Homo sapiens
QVLVENFSNFTNR

SEQ ID NO: 5746 - protein, 13 aa, Homo sapiens
QVLVENFSNFTNR

SEQ ID NO: 5747 - protein, 13 aa, Homo sapiens
QVLVENFSNFTNR

SEQ ID NO: 5748 - protein, 10 aa, Homo sapiens
SVADSVLFLR

SEQ ID NO: 5749 - protein, 10 aa, Homo sapiens
SVADSVLFLR

SEQ ID NO: 5750 - protein, 10 aa, Homo sapiens
SVADSVLFLR

SEQ ID NO: 5751 - protein, 10 aa, Homo sapiens
SVADSVLFLR

SEQ ID NO: 5752 - protein, 17 aa, Homo sapiens
HENTSSSPIQYEFSLTR

SEQ ID NO: 5753 - protein, 17 aa, Homo sapiens
HENTSSSPIQYEFSLTR

SEQ ID NO: 5754 - protein, 17 aa, Homo sapiens
HENTSSSPIQYEFSLTR

SEQ ID NO: 5755 - protein, 17 aa, Homo sapiens
HENTSSSPIQYEFSLTR

SEQ ID NO: 5756 - protein, 10 aa, Homo sapiens
VLYLSAFTSK

SEQ ID NO: 5757 - protein, 10 aa, Homo sapiens
VLYLSAFTSK

SEQ ID NO: 5758 - protein, 10 aa, Homo sapiens
VLYLSAFTSK

SEQ ID NO: 5759 - protein, 10 aa, Homo sapiens
VLYLSAFTSK

SEQ ID NO: 5760 - protein, 15 aa, Homo sapiens
FVGTPEVNQTTLYQR

SEQ ID NO: 5761 - protein, 15 aa, Homo sapiens
FVGTPEVNQTTLYQR

SEQ ID NO: 5762 - protein, 15 aa, Homo sapiens
FVGTPEVNQTTLYQR

SEQ ID NO: 5763 - protein, 15 aa, Homo sapiens
FVGTPEVNQTTLYQR

SEQ ID NO: 5764 - protein, 12 aa, Homo sapiens
GFQALGDAADIR

SEQ ID NO: 5765 - protein, 12 aa, Homo sapiens
GFQALGDAADIR

SEQ ID NO: 5766 - protein, 12 aa, Homo sapiens
GFQALGDAADIR

SEQ ID NO: 5767 - protein, 12 aa, Homo sapiens
GFQALGDAADIR

SEQ ID NO: 5768 - protein, 9 aa, Homo sapiens
SEEFLIAGK

SEQ ID NO: 5769 - protein, 9 aa, Homo sapiens
SEEFLIAGK

SEQ ID NO: 5770 - protein, 9 aa, Homo sapiens
SEEFLIAGK

SEQ ID NO: 5771 - protein, 9 aa, Homo sapiens
SEEFLIAGK

SEQ ID NO: 5772 - protein, 12 aa, Homo sapiens
EGPFGTLVYTIK

SEQ ID NO: 5773 - protein, 12 aa, Homo sapiens
EGPFGTLVYTIK

SEQ ID NO: 5774 - protein, 12 aa, Homo sapiens
EGPFGTLVYTIK

SEQ ID NO: 5775 - protein, 12 aa, Homo sapiens
EGPFGTLVYTIK

SEQ ID NO: 5776 - protein, 7 aa, Homo sapiens
GWAPPDK

SEQ ID NO: 5777 - protein, 8 aa, Homo sapiens
SIINATDP

SEQ ID NO: 5778 - protein, 8 aa, Homo sapiens
YQYLLTGR

SEQ ID NO: 5779 - protein, 8 aa, Homo sapiens
YQYLLTGR

SEQ ID NO: 5780 - protein, 8 aa, Homo sapiens
YQYLLTGR

SEQ ID NO: 5781 - protein, 8 aa, Homo sapiens
YQYLLTGR

SEQ ID NO: 5782 - protein, 12 aa, Homo sapiens
DGTSENSPLIGR

SEQ ID NO: 5783 - protein, 12 aa, Homo sapiens
DGTSENSPLIGR

SEQ ID NO: 5784 - protein, 12 aa, Homo sapiens
DGTSENSPLIGR

SEQ ID NO: 5785 - protein, 12 aa, Homo sapiens
DGTSENSPLIGR

SEQ ID NO: 5786 - protein, 11 aa, Homo sapiens
IPDPLVATGNK

SEQ ID NO: 5787 - protein, 11 aa, Homo sapiens
IPDPLVATGNK

SEQ ID NO: 5788 - protein, 11 aa, Homo sapiens
IPDPLVATGNK

SEQ ID NO: 5789 - protein, 11 aa, Homo sapiens
IPDPLVATGNK

SEQ ID NO: 5790 - protein, 12 aa, Homo sapiens
LNGTITTPGWPK

SEQ ID NO: 5791 - protein, 12 aa, Homo sapiens
LNGTITTPGWPK

SEQ ID NO: 5792 - protein, 12 aa, Homo sapiens
LNGTITTPGWPK

SEQ ID NO: 5793 - protein, 12 aa, Homo sapiens
LNGTITTPGWPK

SEQ ID NO: 5794 - protein, 11 aa, Homo sapiens
VPLQFSGQNEK

SEQ ID NO: 5795 - protein, 11 aa, Homo sapiens
VPLQFSGQNEK

SEQ ID NO: 5796 - protein, 11 aa, Homo sapiens
VPLQFSGQNEK

SEQ ID NO: 5797 - protein, 11 aa, Homo sapiens
VPLQFSGQNEK

SEQ ID NO: 5798 - protein, 15 aa, Homo sapiens
YDYVEIWSGLSSESK

SEQ ID NO: 5799 - protein, 14 aa, Homo sapiens
AAPFLTYFGLFQVH

SEQ ID NO: 5800 - protein, 14 aa, Homo sapiens
AAPFLTYFGLFQVH

SEQ ID NO: 5801 - protein, 14 aa, Homo sapiens
AAPFLTYFGLFQVH

SEQ ID NO: 5802 - protein, 14 aa, Homo sapiens
AAPFLTYFGLFQVH

SEQ ID NO: 5803 - protein, 8 aa, Homo sapiens
INSSSPLR

SEQ ID NO: 5804 - protein, 8 aa, Homo sapiens
INSSSPLR

SEQ ID NO: 5805 - protein, 8 aa, Homo sapiens
INSSSPLR

SEQ ID NO: 5806 - protein, 8 aa, Homo sapiens
INSSSPLR

SEQ ID NO: 5807 - protein, 12 aa, Homo sapiens
LDLLVDGVLALR

SEQ ID NO: 5808 - protein, 12 aa, Homo sapiens
LDLLVDGVLALR

SEQ ID NO: 5809 - protein, 12 aa, Homo sapiens
LDLLVDGVLALR

SEQ ID NO: 5810 - protein, 12 aa, Homo sapiens
LDLLVDGVLALR

SEQ ID NO: 5811 - protein, 9 aa, Homo sapiens
QIGEFIVTR

SEQ ID NO: 5812 - protein, 9 aa, Homo sapiens
QIGEFIVTR

SEQ ID NO: 5813 - protein, 9 aa, Homo sapiens
QIGEFIVTR

SEQ ID NO: 5814 - protein, 9 aa, Homo sapiens
QIGEFIVTR

SEQ ID NO: 5815 - protein, 8 aa, Homo sapiens
TLPWAHLK

SEQ ID NO: 5816 - protein, 8 aa, Homo sapiens
TLPWAHLK

SEQ ID NO: 5817 - protein, 8 aa, Homo sapiens
TLPWAHLK

SEQ ID NO: 5818 - protein, 8 aa, Homo sapiens
TLPWAHLK

SEQ ID NO: 5819 - protein, 12 aa, Homo sapiens
DITSDSENSNFR

SEQ ID NO: 5820 - protein, 12 aa, Homo sapiens
DITSDSENSNFR

SEQ ID NO: 5821 - protein, 12 aa, Homo sapiens
DITSDSENSNFR

SEQ ID NO: 5822 - protein, 12 aa, Homo sapiens
DITSDSENSNFR

SEQ ID NO: 5823 - protein, 7 aa, Homo sapiens
IQTIILK

SEQ ID NO: 5824 - protein, 7 aa, Homo sapiens
IQTIILK

SEQ ID NO: 5825 - protein, 7 aa, Homo sapiens
IQTIILK

SEQ ID NO: 5826 - protein, 7 aa, Homo sapiens
IQTIILK

SEQ ID NO: 5827 - protein, 11 aa, Homo sapiens
NDNVQDTAEQK

SEQ ID NO: 5828 - protein, 11 aa, Homo sapiens
NDNVQDTAEQK

SEQ ID NO: 5829 - protein, 11 aa, Homo sapiens
NDNVQDTAEQK

SEQ ID NO: 5830 - protein, 11 aa, Homo sapiens
NDNVQDTAEQK

SEQ ID NO: 5831 - protein, 7 aa, Homo sapiens
NEIQSLV

SEQ ID NO: 5832 - protein, 12 aa, Homo sapiens
SVNAQVTDINSK

SEQ ID NO: 5833 - protein, 12 aa, Homo sapiens
SVNAQVTDINSK

SEQ ID NO: 5834 - protein, 12 aa, Homo sapiens
SVNAQVTDINSK

SEQ ID NO: 5835 - protein, 12 aa, Homo sapiens
SVNAQVTDINSK

SEQ ID NO: 5836 - protein, 29 aa, Homo sapiens
ELASQPDVDGFLVGGASLKPEFVDIINAK

SEQ ID NO: 5837 - protein, 12 aa, Homo sapiens
SNVSDAVAQSTR

SEQ ID NO: 5838 - protein, 12 aa, Homo sapiens
SNVSDAVAQSTR

SEQ ID NO: 5839 - protein, 12 aa, Homo sapiens
SNVSDAVAQSTR

SEQ ID NO: 5840 - protein, 12 aa, Homo sapiens
SNVSDAVAQSTR

SEQ ID NO: 5841 - protein, 13 aa, Homo sapiens
TATPQQAQEVHEK

SEQ ID NO: 5842 - protein, 13 aa, Homo sapiens
TATPQQAQEVHEK

SEQ ID NO: 5843 - protein, 13 aa, Homo sapiens
TATPQQAQEVHEK

SEQ ID NO: 5844 - protein, 13 aa, Homo sapiens
TATPQQAQEVHEK

SEQ ID NO: 5845 - protein, 7 aa, Homo sapiens
VVFEQTK

SEQ ID NO: 5846 - protein, 7 aa, Homo sapiens
VVFEQTK

SEQ ID NO: 5847 - protein, 7 aa, Homo sapiens
VVFEQTK

SEQ ID NO: 5848 - protein, 7 aa, Homo sapiens
VVFEQTK

SEQ ID NO: 5849 - protein, 15 aa, Homo sapiens
VVLAYEPVWAIGTGK

SEQ ID NO: 5850 - protein, 15 aa, Homo sapiens
VVLAYEPVWAIGTGK

SEQ ID NO: 5851 - protein, 15 aa, Homo sapiens
VVLAYEPVWAIGTGK

SEQ ID NO: 5852 - protein, 15 aa, Homo sapiens
VVLAYEPVWAIGTGK

SEQ ID NO: 5853 - protein, 20 aa, Homo sapiens
ADAVTLDGGFIYEAGLAPYK

SEQ ID NO: 5854 - protein, 20 aa, Homo sapiens
ADAVTLDGGFIYEAGLAPYK

SEQ ID NO: 5855 - protein, 20 aa, Homo sapiens
ADAVTLDGGFIYEAGLAPYK

SEQ ID NO: 5856 - protein, 20 aa, Homo sapiens
ADAVTLDGGFIYEAGLAPYK

SEQ ID NO: 5857 - protein, 11 aa, Homo sapiens
FQLFGSPSGQK

SEQ ID NO: 5858 - protein, 11 aa, Homo sapiens
FQLFGSPSGQK

SEQ ID NO: 5859 - protein, 11 aa, Homo sapiens
FQLFGSPSGQK

SEQ ID NO: 5860 - protein, 11 aa, Homo sapiens
FQLFGSPSGQK

SEQ ID NO: 5861 - protein, 13 aa, Homo sapiens
LRPVAAEVYGTER

SEQ ID NO: 5862 - protein, 13 aa, Homo sapiens
LRPVAAEVYGTER

SEQ ID NO: 5863 - protein, 13 aa, Homo sapiens
LRPVAAEVYGTER

SEQ ID NO: 5864 - protein, 13 aa, Homo sapiens
LRPVAAEVYGTER

SEQ ID NO: 5865 - protein, 9 aa, Homo sapiens
VPSHAVVAR

SEQ ID NO: 5866 - protein, 9 aa, Homo sapiens
VPSHAVVAR

SEQ ID NO: 5867 - protein, 9 aa, Homo sapiens
VPSHAVVAR

SEQ ID NO: 5868 - protein, 9 aa, Homo sapiens
VPSHAVVAR

SEQ ID NO: 5869 - protein, 9 aa, Homo sapiens
YYGYTGAFR

SEQ ID NO: 5870 - protein, 9 aa, Homo sapiens
YYGYTGAFR

SEQ ID NO: 5871 - protein, 9 aa, Homo sapiens
YYGYTGAFR

SEQ ID NO: 5872 - protein, 9 aa, Homo sapiens
YYGYTGAFR

SEQ ID NO: 5873 - protein, 9 aa, Homo sapiens
FQDLVDAVR

SEQ ID NO: 5874 - protein, 9 aa, Homo sapiens
FQDLVDAVR

SEQ ID NO: 5875 - protein, 9 aa, Homo sapiens
FQDLVDAVR

SEQ ID NO: 5876 - protein, 9 aa, Homo sapiens
FQDLVDAVR

SEQ ID NO: 5877 - protein, 18 aa, Homo sapiens
FTGSQPFGQGVEHATANK

SEQ ID NO: 5878 - protein, 18 aa, Homo sapiens
FTGSQPFGQGVEHATANK

SEQ ID NO: 5879 - protein, 18 aa, Homo sapiens
FTGSQPFGQGVEHATANK

SEQ ID NO: 5880 - protein, 18 aa, Homo sapiens
FTGSQPFGQGVEHATANK

SEQ ID NO: 5881 - protein, 12 aa, Homo sapiens
FVFGTTPEDILR

SEQ ID NO: 5882 - protein, 12 aa, Homo sapiens
FVFGTTPEDILR

SEQ ID NO: 5883 - protein, 12 aa, Homo sapiens
FVFGTTPEDILR

SEQ ID NO: 5884 - protein, 12 aa, Homo sapiens
FVFGTTPEDILR

SEQ ID NO: 5885 - protein, 9 aa, Homo sapiens
GFLLLASLR

SEQ ID NO: 5886 - protein, 9 aa, Homo sapiens
GFLLLASLR

SEQ ID NO: 5887 - protein, 9 aa, Homo sapiens
GFLLLASLR

SEQ ID NO: 5888 - protein, 9 aa, Homo sapiens
GFLLLASLR

SEQ ID NO: 5889 - protein, 12 aa, Homo sapiens
GTSQNDPNWVVR

SEQ ID NO: 5890 - protein, 12 aa, Homo sapiens
GTSQNDPNWVVR

SEQ ID NO: 5891 - protein, 12 aa, Homo sapiens
GTSQNDPNWVVR

SEQ ID NO: 5892 - protein, 12 aa, Homo sapiens
GTSQNDPNWVVR

SEQ ID NO: 5893 - protein, 22 aa, Homo sapiens
TSESGELHGLTTEEEFVEGIYK

SEQ ID NO: 5894 - protein, 22 aa, Homo sapiens
TSESGELHGLTTEEEFVEGIYK

SEQ ID NO: 5895 - protein, 22 aa, Homo sapiens
TSESGELHGLTTEEEFVEGIYK

SEQ ID NO: 5896 - protein, 22 aa, Homo sapiens
TSESGELHGLTTEEEFVEGIYK

SEQ ID NO: 5897 - protein, 6 aa, Homo sapiens
VEIDTK

SEQ ID NO: 5898 - protein, 6 aa, Homo sapiens
VEIDTK

SEQ ID NO: 5899 - protein, 6 aa, Homo sapiens
VEIDTK

SEQ ID NO: 5900 - protein, 11 aa, Homo sapiens
ALQEALVLSDR

SEQ ID NO: 5901 - protein, 11 aa, Homo sapiens
ALQEALVLSDR

SEQ ID NO: 5902 - protein, 11 aa, Homo sapiens
ALQEALVLSDR

SEQ ID NO: 5903 - protein, 11 aa, Homo sapiens
ALQEALVLSDR

SEQ ID NO: 5904 - protein, 17 aa, Homo sapiens
EQEELLAPADGTVELVR

SEQ ID NO: 5905 - protein, 17 aa, Homo sapiens
EQEELLAPADGTVELVR

SEQ ID NO: 5906 - protein, 17 aa, Homo sapiens
EQEELLAPADGTVELVR

SEQ ID NO: 5907 - protein, 17 aa, Homo sapiens
EQEELLAPADGTVELVR

SEQ ID NO: 5908 - protein, 7 aa, Homo sapiens
LSEADIR

SEQ ID NO: 5909 - protein, 12 aa, Homo sapiens
TLVGVGASLGLR

SEQ ID NO: 5910 - protein, 12 aa, Homo sapiens
TLVGVGASLGLR

SEQ ID NO: 5911 - protein, 12 aa, Homo sapiens
TLVGVGASLGLR

SEQ ID NO: 5912 - protein, 12 aa, Homo sapiens
TLVGVGASLGLR

SEQ ID NO: 5913 - protein, 13 aa, Homo sapiens
VAAALDDGSALGR

SEQ ID NO: 5914 - protein, 13 aa, Homo sapiens
VAAALDDGSALGR

SEQ ID NO: 5915 - protein, 13 aa, Homo sapiens
VAAALDDGSALGR

SEQ ID NO: 5916 - protein, 13 aa, Homo sapiens
VAAALDDGSALGR

SEQ ID NO: 5917 - protein, 9 aa, Homo sapiens
DLSQNFPTK

SEQ ID NO: 5918 - protein, 9 aa, Homo sapiens
DLSQNFPTK

SEQ ID NO: 5919 - protein, 9 aa, Homo sapiens
DLSQNFPTK

SEQ ID NO: 5920 - protein, 9 aa, Homo sapiens
DLSQNFPTK

SEQ ID NO: 5921 - protein, 9 aa, Homo sapiens
FTILDSQGK

SEQ ID NO: 5922 - protein, 9 aa, Homo sapiens
FTILDSQGK

SEQ ID NO: 5923 - protein, 9 aa, Homo sapiens
FTILDSQGK

SEQ ID NO: 5924 - protein, 9 aa, Homo sapiens
FTILDSQGK

SEQ ID NO: 5925 - protein, 25 aa, Homo sapiens
IIGPLEDSELFNQDDFHLLENIILK

SEQ ID NO: 5926 - protein, 13 aa, Homo sapiens
LGIEGLSLHNVLK

SEQ ID NO: 5927 - protein, 13 aa, Homo sapiens
LGIEGLSLHNVLK

SEQ ID NO: 5928 - protein, 13 aa, Homo sapiens
LGIEGLSLHNVLK

SEQ ID NO: 5929 - protein, 13 aa, Homo sapiens
LGIEGLSLHNVLK

SEQ ID NO: 5930 - protein, 17 aa, Homo sapiens
YVLEPEISFTSDNSFAK

SEQ ID NO: 5931 - protein, 17 aa, Homo sapiens
YVLEPEISFTSDNSFAK

SEQ ID NO: 5932 - protein, 17 aa, Homo sapiens
YVLEPEISFTSDNSFAK

SEQ ID NO: 5933 - protein, 17 aa, Homo sapiens
YVLEPEISFTSDNSFAK

SEQ ID NO: 5934 - protein, 9 aa, Homo sapiens
ANPGAWILR

SEQ ID NO: 5935 - protein, 19 aa, Homo sapiens
FLGPLDEDFYAEDFYLLEK

SEQ ID NO: 5936 - protein, 19 aa, Homo sapiens
FLGPLDEDFYAEDFYLLEK

SEQ ID NO: 5937 - protein, 19 aa, Homo sapiens
FLGPLDEDFYAEDFYLLEK

SEQ ID NO: 5938 - protein, 19 aa, Homo sapiens
FLGPLDEDFYAEDFYLLEK

SEQ ID NO: 5939 - protein, 11 aa, Homo sapiens
IIFVDADQIVR

SEQ ID NO: 5940 - protein, 14 aa, Homo sapiens
ILFLDVLFPLAVDK

SEQ ID NO: 5941 - protein, 14 aa, Homo sapiens
ILFLDVLFPLAVDK

SEQ ID NO: 5942 - protein, 14 aa, Homo sapiens
ILFLDVLFPLAVDK

SEQ ID NO: 5943 - protein, 14 aa, Homo sapiens
ILFLDVLFPLAVDK

SEQ ID NO: 5944 - protein, 10 aa, Homo sapiens
INEENTAISR

SEQ ID NO: 5945 - protein, 10 aa, Homo sapiens
INEENTAISR

SEQ ID NO: 5946 - protein, 10 aa, Homo sapiens
INEENTAISR

SEQ ID NO: 5947 - protein, 10 aa, Homo sapiens
INEENTAISR

SEQ ID NO: 5948 - protein, 10 aa, Homo sapiens
GGTLTQYEGK

SEQ ID NO: 5949 - protein, 10 aa, Homo sapiens
GGTLTQYEGK

SEQ ID NO: 5950 - protein, 10 aa, Homo sapiens
GGTLTQYEGK

SEQ ID NO: 5951 - protein, 10 aa, Homo sapiens
GGTLTQYEGK

SEQ ID NO: 5952 - protein, 12 aa, Homo sapiens
GLPDNISSVLNK

SEQ ID NO: 5953 - protein, 12 aa, Homo sapiens
GLPDNISSVLNK

SEQ ID NO: 5954 - protein, 12 aa, Homo sapiens
GLPDNISSVLNK

SEQ ID NO: 5955 - protein, 12 aa, Homo sapiens
GLPDNISSVLNK

SEQ ID NO: 5956 - protein, 12 aa, Homo sapiens
GTVIIIANHGDR

SEQ ID NO: 5957 - protein, 12 aa, Homo sapiens
GTVIIIANHGDR

SEQ ID NO: 5958 - protein, 12 aa, Homo sapiens
GTVIIIANHGDR

SEQ ID NO: 5959 - protein, 12 aa, Homo sapiens
GTVIIIANHGDR

SEQ ID NO: 5960 - protein, 12 aa, Homo sapiens
IDIPPGAVLENK

SEQ ID NO: 5961 - protein, 12 aa, Homo sapiens
IDIPPGAVLENK

SEQ ID NO: 5962 - protein, 12 aa, Homo sapiens
IDIPPGAVLENK

SEQ ID NO: 5963 - protein, 12 aa, Homo sapiens
IDIPPGAVLENK

SEQ ID NO: 5964 - protein, 15 aa, Homo sapiens
IFNTNNLWISLAAVK

SEQ ID NO: 5965 - protein, 15 aa, Homo sapiens
IFNTNNLWISLAAVK

SEQ ID NO: 5966 - protein, 15 aa, Homo sapiens
IFNTNNLWISLAAVK

SEQ ID NO: 5967 - protein, 15 aa, Homo sapiens
IFNTNNLWISLAAVK

SEQ ID NO: 5968 - protein, 14 aa, Homo sapiens
IQRPPEDSIQPYEK

SEQ ID NO: 5969 - protein, 14 aa, Homo sapiens
IQRPPEDSIQPYEK

SEQ ID NO: 5970 - protein, 14 aa, Homo sapiens
IQRPPEDSIQPYEK

SEQ ID NO: 5971 - protein, 14 aa, Homo sapiens
IQRPPEDSIQPYEK

SEQ ID NO: 5972 - protein, 9 aa, Homo sapiens
LVEIAQVPK

SEQ ID NO: 5973 - protein, 9 aa, Homo sapiens
LVEIAQVPK

SEQ ID NO: 5974 - protein, 9 aa, Homo sapiens
LVEIAQVPK

SEQ ID NO: 5975 - protein, 9 aa, Homo sapiens
LVEIAQVPK

SEQ ID NO: 5976 - protein, 18 aa, Homo sapiens
NENTFLDLTVQQIEHLNK

SEQ ID NO: 5977 - protein, 18 aa, Homo sapiens
NENTFLDLTVQQIEHLNK

SEQ ID NO: 5978 - protein, 18 aa, Homo sapiens
NENTFLDLTVQQIEHLNK

SEQ ID NO: 5979 - protein, 18 aa, Homo sapiens
NENTFLDLTVQQIEHLNK

SEQ ID NO: 5980 - protein, 12 aa, Homo sapiens
SFENSLGINVPR

SEQ ID NO: 5981 - protein, 12 aa, Homo sapiens
SFENSLGINVPR

SEQ ID NO: 5982 - protein, 12 aa, Homo sapiens
SFENSLGINVPR

SEQ ID NO: 5983 - protein, 12 aa, Homo sapiens
SFENSLGINVPR

SEQ ID NO: 5984 - protein, 20 aa, Homo sapiens
TLDGGLNVIQLETAVGAAIK

SEQ ID NO: 5985 - protein, 20 aa, Homo sapiens
TLDGGLNVIQLETAVGAAIK

SEQ ID NO: 5986 - protein, 20 aa, Homo sapiens
TLDGGLNVIQLETAVGAAIK

SEQ ID NO: 5987 - protein, 20 aa, Homo sapiens
TLDGGLNVIQLETAVGAAIK

SEQ ID NO: 5988 - protein, 13 aa, Homo sapiens
LWEEGEELELVEK

SEQ ID NO: 5989 - protein, 9 aa, Homo sapiens
LWGGTLLWT

SEQ ID NO: 5990 - protein, 10 aa, Homo sapiens
LVDTLPQKPR

SEQ ID NO: 5991 - protein, 27 aa, Homo sapiens
VIETLLMDTPSSYEAAMELFSPDQDMR

SEQ ID NO: 5992 - protein, 8 aa, Homo sapiens
ADDYEQVK

SEQ ID NO: 5993 - protein, 8 aa, Homo sapiens
ADDYEQVK

SEQ ID NO: 5994 - protein, 8 aa, Homo sapiens
ADDYEQVK

SEQ ID NO: 5995 - protein, 8 aa, Homo sapiens
ADDYEQVK

SEQ ID NO: 5996 - protein, 27 aa, Homo sapiens
LHLQSTDYGNFLANEASPLTVSVIDDR

SEQ ID NO: 5997 - protein, 13 aa, Homo sapiens
LLFEGAGSNPGDK

SEQ ID NO: 5998 - protein, 13 aa, Homo sapiens
LLFEGAGSNPGDK

SEQ ID NO: 5999 - protein, 13 aa, Homo sapiens
LLFEGAGSNPGDK

SEQ ID NO: 6000 - protein, 13 aa, Homo sapiens
LLFEGAGSNPGDK

SEQ ID NO: 6001 - protein, 11 aa, Homo sapiens
LYPEGLAQLAR

SEQ ID NO: 6002 - protein, 11 aa, Homo sapiens
LYPEGLAQLAR

SEQ ID NO: 6003 - protein, 11 aa, Homo sapiens
LYPEGLAQLAR

SEQ ID NO: 6004 - protein, 11 aa, Homo sapiens
LYPEGLAQLAR

SEQ ID NO: 6005 - protein, 10 aa, Homo sapiens
NVADYYPEYK

SEQ ID NO: 6006 - protein, 10 aa, Homo sapiens
NVADYYPEYK

SEQ ID NO: 6007 - protein, 10 aa, Homo sapiens
NVADYYPEYK

SEQ ID NO: 6008 - protein, 10 aa, Homo sapiens
NVADYYPEYK

SEQ ID NO: 6009 - protein, 10 aa, Homo sapiens
LQAETELINR

SEQ ID NO: 6010 - protein, 10 aa, Homo sapiens
LQAETELINR

SEQ ID NO: 6011 - protein, 10 aa, Homo sapiens
LQAETELINR

SEQ ID NO: 6012 - protein, 10 aa, Homo sapiens
LQAETELINR

SEQ ID NO: 6013 - protein, 13 aa, Homo sapiens
NDQNLYQVFINYK

SEQ ID NO: 6014 - protein, 13 aa, Homo sapiens
NDQNLYQVFINYK

SEQ ID NO: 6015 - protein, 13 aa, Homo sapiens
NDQNLYQVFINYK

SEQ ID NO: 6016 - protein, 13 aa, Homo sapiens
NDQNLYQVFINYK

SEQ ID NO: 6017 - protein, 26 aa, Homo sapiens
QFQLSIENLNQPVLLFGRPQGDGEIR

SEQ ID NO: 6018 - protein, 25 aa, Homo sapiens
TPIALATGIRPFPTEESINDEDIYK

SEQ ID NO: 6019 - protein, 16 aa, Homo sapiens
VTWDSAQVFDLAQTLR

SEQ ID NO: 6020 - protein, 16 aa, Homo sapiens
VTWDSAQVFDLAQTLR

SEQ ID NO: 6021 - protein, 16 aa, Homo sapiens
VTWDSAQVFDLAQTLR

SEQ ID NO: 6022 - protein, 16 aa, Homo sapiens
VTWDSAQVFDLAQTLR

SEQ ID NO: 6023 - protein, 7 aa, Homo sapiens
QLELNER

SEQ ID NO: 6024 - protein, 7 aa, Homo sapiens
QLELNER

SEQ ID NO: 6025 - protein, 7 aa, Homo sapiens
QLELNER

SEQ ID NO: 6026 - protein, 7 aa, Homo sapiens
QLELNER

SEQ ID NO: 6027 - protein, 9 aa, Homo sapiens
SWSVYVGAR

SEQ ID NO: 6028 - protein, 9 aa, Homo sapiens
SWSVYVGAR

SEQ ID NO: 6029 - protein, 9 aa, Homo sapiens
SWSVYVGAR

SEQ ID NO: 6030 - protein, 9 aa, Homo sapiens
SWSVYVGAR

SEQ ID NO: 6031 - protein, 7 aa, Homo sapiens
DLEEQLR

SEQ ID NO: 6032 - protein, 7 aa, Homo sapiens
DLEEQLR

SEQ ID NO: 6033 - protein, 7 aa, Homo sapiens
DLEEQLR

SEQ ID NO: 6034 - protein, 7 aa, Homo sapiens
DLEEQLR

SEQ ID NO: 6035 - protein, 31 aa, Homo sapiens
EAPAAAAAFESGLDLSDAEPDAGEATAYASK

SEQ ID NO: 6036 - protein, 31 aa, Homo sapiens; identical to SEQ ID NO: 6035

SEQ ID NO: 6037 - protein, 31 aa, Homo sapiens; identical to SEQ ID NO: 6035

SEQ ID NO: 6038 - protein, 31 aa, Homo sapiens; identical to SEQ ID NO: 6035

SEQ ID NO: 6039 - protein, 8 aa, Homo sapiens
EQANLNSR

SEQ ID NO: 6040 - protein, 8 aa, Homo sapiens
EQANLNSR

SEQ ID NO: 6041 - protein, 8 aa, Homo sapiens
EQANLNSR

SEQ ID NO: 6042 - protein, 8 aa, Homo sapiens
EQANLNSR

SEQ ID NO: 6043 - protein, 12 aa, Homo sapiens
FAAAHYNTEILK

SEQ ID NO: 6044 - protein, 12 aa, Homo sapiens
FAAAHYNTEILK

SEQ ID NO: 6045 - protein, 12 aa, Homo sapiens
FAAAHYNTEILK

SEQ ID NO: 6046 - protein, 12 aa, Homo sapiens
FAAAHYNTEILK

SEQ ID NO: 6047 - protein, 8 aa, Homo sapiens
NQPLNPGK

SEQ ID NO: 6048 - protein, 8 aa, Homo sapiens
NQPLNPGK

SEQ ID NO: 6049 - protein, 8 aa, Homo sapiens
NQPLNPGK

SEQ ID NO: 6050 - protein, 8 aa, Homo sapiens
NQPLNPGK

SEQ ID NO: 6051 - protein, 10 aa, Homo sapiens
AASSLEELLR

SEQ ID NO: 6052 - protein, 10 aa, Homo sapiens
AASSLEELLR

SEQ ID NO: 6053 - protein, 10 aa, Homo sapiens
AASSLEELLR

SEQ ID NO: 6054 - protein, 10 aa, Homo sapiens
AASSLEELLR

SEQ ID NO: 6055 - protein, 7 aa, Homo sapiens
DLIQHPK

SEQ ID NO: 6056 - protein, 7 aa, Homo sapiens
DLIQHPK

SEQ ID NO: 6057 - protein, 7 aa, Homo sapiens
DLIQHPK

SEQ ID NO: 6058 - protein, 7 aa, Homo sapiens
DLIQHPK

SEQ ID NO: 6059 - protein, 12 aa, Homo sapiens
FAATFYDIETLK

SEQ ID NO: 6060 - protein, 12 aa, Homo sapiens
FAATFYDIETLK

SEQ ID NO: 6061 - protein, 12 aa, Homo sapiens
FAATFYDIETLK

SEQ ID NO: 6062 - protein, 12 aa, Homo sapiens
FAATFYDIETLK

SEQ ID NO: 6063 - protein, 19 aa, Homo sapiens
QLFEISVPLTSVPELVPVK

SEQ ID NO: 6064 - protein, 19 aa, Homo sapiens
QLFEISVPLTSVPELVPVK

SEQ ID NO: 6065 - protein, 19 aa, Homo sapiens
QLFEISVPLTSVPELVPVK

SEQ ID NO: 6066 - protein, 19 aa, Homo sapiens
QLFEISVPLTSVPELVPVK

SEQ ID NO: 6067 - protein, 8 aa, Homo sapiens
VIDEEWQR

SEQ ID NO: 6068 - protein, 11 aa, Homo sapiens
AFPSPEVVWLK

SEQ ID NO: 6069 - protein, 11 aa, Homo sapiens
AFPSPEVVWLK

SEQ ID NO: 6070 - protein, 11 aa, Homo sapiens
AFPSPEVVWLK

SEQ ID NO: 6071 - protein, 11 aa, Homo sapiens
AFPSPEVVWLK

SEQ ID NO: 6072 - protein, 16 aa, Homo sapiens
AVSSFPDPALYPLGSR

SEQ ID NO: 6073 - protein, 16 aa, Homo sapiens
AVSSFPDPALYPLGSR

SEQ ID NO: 6074 - protein, 16 aa, Homo sapiens
AVSSFPDPALYPLGSR

SEQ ID NO: 6075 - protein, 16 aa, Homo sapiens
AVSSFPDPALYPLGSR

SEQ ID NO: 6076 - protein, 17 aa, Homo sapiens
GSVESSAYLTVQGTSDK

SEQ ID NO: 6077 - protein, 17 aa, Homo sapiens
GSVESSAYLTVQGTSDK

SEQ ID NO: 6078 - protein, 17 aa, Homo sapiens
GSVESSAYLTVQGTSDK

SEQ ID NO: 6079 - protein, 17 aa, Homo sapiens
GSVESSAYLTVQGTSDK

SEQ ID NO: 6080 - protein, 14 aa, Homo sapiens
LGDLLQANVQQDGK

SEQ ID NO: 6081 - protein, 14 aa, Homo sapiens
LGDLLQANVQQDGK

SEQ ID NO: 6082 - protein, 14 aa, Homo sapiens
LGDLLQANVQQDGK

SEQ ID NO: 6083 - protein, 14 aa, Homo sapiens
LGDLLQANVQQDGK

SEQ ID NO: 6084 - protein, 11 aa, Homo sapiens
NILLSENNVVK

SEQ ID NO: 6085 - protein, 23 aa, Homo sapiens
ATWLSLFSSEESNLGANNYDDYR

SEQ ID NO: 6086 - protein, 8 aa, Homo sapiens
AVRPGYPK

SEQ ID NO: 6087 - protein, 8 aa, Homo sapiens
AVRPGYPK

SEQ ID NO: 6088 - protein, 8 aa, Homo sapiens
AVRPGYPK

SEQ ID NO: 6089 - protein, 8 aa, Homo sapiens
AVRPGYPK

SEQ ID NO: 6090 - protein, 14 aa, Homo sapiens
DSWEDIFELLFWGR

SEQ ID NO: 6091 - protein, 14 aa, Homo sapiens
DSWEDIFELLFWGR

SEQ ID NO: 6092 - protein, 14 aa, Homo sapiens
DSWEDIFELLFWGR

SEQ ID NO: 6093 - protein, 14 aa, Homo sapiens
DSWEDIFELLFWGR

SEQ ID NO: 6094 - protein, 15 aa, Homo sapiens
DVWGIEGPIDAAFTR

SEQ ID NO: 6095 - protein, 15 aa, Homo sapiens
DVWGIEGPIDAAFTR

SEQ ID NO: 6096 - protein, 15 aa, Homo sapiens
DVWGIEGPIDAAFTR

SEQ ID NO: 6097 - protein, 15 aa, Homo sapiens
DVWGIEGPIDAAFTR

SEQ ID NO: 6098 - protein, 12 aa, Homo sapiens
FEDGVLDPDYPR

SEQ ID NO: 6099 - protein, 12 aa, Homo sapiens
FEDGVLDPDYPR

SEQ ID NO: 6100 - protein, 12 aa, Homo sapiens
FEDGVLDPDYPR

SEQ ID NO: 6101 - protein, 12 aa, Homo sapiens
FEDGVLDPDYPR

SEQ ID NO: 6102 - protein, 9 aa, Homo sapiens
AGDLQVRPR

SEQ ID NO: 6103 - protein, 11 aa, Homo sapiens
QAWVSQGGGAK

SEQ ID NO: 6104 - protein, 11 aa, Homo sapiens
QAWVSQGGGAK

SEQ ID NO: 6105 - protein, 11 aa, Homo sapiens
QAWVSQGGGAK

SEQ ID NO: 6106 - protein, 11 aa, Homo sapiens
QAWVSQGGGAK

SEQ ID NO: 6107 - protein, 9 aa, Homo sapiens
VNELGRPAR

SEQ ID NO: 6108 - protein, 9 aa, Homo sapiens
VNELGRPAR

SEQ ID NO: 6109 - protein, 9 aa, Homo sapiens
VNELGRPAR

SEQ ID NO: 6110 - protein, 7 aa, Homo sapiens
ENRPDAR

SEQ ID NO: 6111 - protein, 19 aa, Homo sapiens
ESAFVHAIASAGVAFAVTR

SEQ ID NO: 6112 - protein, 9 aa, Homo sapiens
GWVETLRPR

SEQ ID NO: 6113 - protein, 7 aa, Homo sapiens
HQGSPGK

SEQ ID NO: 6114 - protein, 7 aa, Homo sapiens
HQGSPGK

SEQ ID NO: 6115 - protein, 7 aa, Homo sapiens
HQGSPGK

SEQ ID NO: 6116 - protein, 7 aa, Homo sapiens
HQGSPGK

SEQ ID NO: 6117 - protein, 5 aa, Homo sapiens
YTYFK

SEQ ID NO: 6118 - protein, 11 aa, Homo sapiens
GVAAGSSSSVK

SEQ ID NO: 6119 - protein, 11 aa, Homo sapiens
GVAAGSSSSVK

SEQ ID NO: 6120 - protein, 11 aa, Homo sapiens
GVAAGSSSSVK

SEQ ID NO: 6121 - protein, 11 aa, Homo sapiens
GVAAGSSSSVK

SEQ ID NO: 6122 - protein, 8 aa, Homo sapiens
IHTHGVFR

SEQ ID NO: 6123 - protein, 8 aa, Homo sapiens
IHTHGVFR

SEQ ID NO: 6124 - protein, 8 aa, Homo sapiens
IHTHGVFR

SEQ ID NO: 6125 - protein, 8 aa, Homo sapiens
IHTHGVFR

SEQ ID NO: 6126 - protein, 32 aa, Homo sapiens
NQGYSTVTFDGTPSYGHTPSHHAAQFPNHSFK

SEQ ID NO: 6127 - protein, 6 aa, Homo sapiens
SDELVR

SEQ ID NO: 6128 - protein, 6 aa, Homo sapiens
SDELVR

SEQ ID NO: 6129 - protein, 6 aa, Homo sapiens
SDELVR

SEQ ID NO: 6130 - protein, 6 aa, Homo sapiens
SDELVR

SEQ ID NO: 6131 - protein, 18 aa, Homo sapiens
YGPFGPPPPSQASSGQAR

SEQ ID NO: 6132 - protein, 18 aa, Homo sapiens
YGPFGPPPPSQASSGQAR

SEQ ID NO: 6133 - protein, 18 aa, Homo sapiens
YGPFGPPPPSQASSGQAR

SEQ ID NO: 6134 - protein, 18 aa, Homo sapiens
YGPFGPPPPSQASSGQAR

SEQ ID NO: 6135 - protein, 18 aa, Homo sapiens
DIVEYYNDSNGSHVLQGR

SEQ ID NO: 6136 - protein, 7 aa, Homo sapiens
DYIEFNK

SEQ ID NO: 6137 - protein, 16 aa, Homo sapiens
EIPAWVPFDPAAQITK

SEQ ID NO: 6138 - protein, 16 aa, Homo sapiens
EIPAWVPFDPAAQITK

SEQ ID NO: 6139 - protein, 16 aa, Homo sapiens
EIPAWVPFDPAAQITK

SEQ ID NO: 6140 - protein, 16 aa, Homo sapiens
EIPAWVPFDPAAQITK

SEQ ID NO: 6141 - protein, 10 aa, Homo sapiens
WEAEPVYVQR

SEQ ID NO: 6142 - protein, 10 aa, Homo sapiens
WEAEPVYVQR

SEQ ID NO: 6143 - protein, 10 aa, Homo sapiens
WEAEPVYVQR

SEQ ID NO: 6144 - protein, 10 aa, Homo sapiens
WEAEPVYVQR

SEQ ID NO: 6145 - protein, 12 aa, Homo sapiens
YSLTYIYTGLSK

SEQ ID NO: 6146 - protein, 30 aa, Homo sapiens
LDGQISSAYPSQEGQVLVGIYGQYQLLGIK

SEQ ID NO: 6147 - protein, 21 aa, Homo sapiens
LGALGGNTQEVTLQPGEYITK

SEQ ID NO: 6148 - protein, 21 aa, Homo sapiens
LGALGGNTQEVTLQPGEYITK

SEQ ID NO: 6149 - protein, 21 aa, Homo sapiens
LGALGGNTQEVTLQPGEYITK

SEQ ID NO: 6150 - protein, 21 aa, Homo sapiens
LGALGGNTQEVTLQPGEYITK

SEQ ID NO: 6151 - protein, 9 aa, Homo sapiens
VSVGLLLVK

SEQ ID NO: 6152 - protein, 16 aa, Homo sapiens
YFSTTEDYDHEITGLR

SEQ ID NO: 6153 - protein, 16 aa, Homo sapiens
YFSTTEDYDHEITGLR

SEQ ID NO: 6154 - protein, 16 aa, Homo sapiens
YFSTTEDYDHEITGLR

SEQ ID NO: 6155 - protein, 16 aa, Homo sapiens
YFSTTEDYDHEITGLR

SEQ ID NO: 6156 - protein, 6 aa, Homo sapiens
YFYFGK

SEQ ID NO: 6157 - protein, 8 aa, Homo sapiens
EDLVYQAK

SEQ ID NO: 6158 - protein, 8 aa, Homo sapiens
IISSIEQK

SEQ ID NO: 6159 - protein, 14 aa, Homo sapiens
AVTEQGAELSNEER

SEQ ID NO: 6160 - protein, 19 aa, Homo sapiens
TAFDEAIAELDTLNEDSYK

SEQ ID NO: 6161 - protein, 12 aa, Homo sapiens
FLIPNASQAESK

SEQ ID NO: 6162 - protein, 14 aa, Homo sapiens
SVTEQGAELSNEER

SEQ ID NO: 6163 - protein, 11 aa, Homo sapiens
AGQAVDDFIEK

SEQ ID NO: 6164 - protein, 20 aa, Homo sapiens
LVPLLDTGDIIIDGGNSEYR

SEQ ID NO: 6165 - protein, 9 aa, Homo sapiens
WFYIASAFR

SEQ ID NO: 6166 - protein, 15 aa, Homo sapiens
YVGGQEHFAHLLILR

SEQ ID NO: 6167 - protein, 17 aa, Homo sapiens
DAGIALLSITHRPSLWK

SEQ ID NO: 6168 - protein, 20 aa, Homo sapiens
GLQAPAGEPTQEASGVAAAK

SEQ ID NO: 6169 - protein, 12 aa, Homo sapiens
NLLTAAADAIER

SEQ ID NO: 6170 - protein, 11 aa, Homo sapiens
LAHQIYQFTDK

SEQ ID NO: 6171 - protein, 11 aa, Homo sapiens
SPEDSSPDAAR

SEQ ID NO: 6172 - protein, 12 aa, Homo sapiens
ELWFSDDPNVTK

SEQ ID NO: 6173 - protein, 7 aa, Homo sapiens
GVIFYLR

SEQ ID NO: 6174 - protein, 12 aa, Homo sapiens
ADDGRPFPQVIK

SEQ ID NO: 6175 - protein, 8 aa, Homo sapiens
ALQASALK

SEQ ID NO: 6176 - protein, 8 aa, Homo sapiens
ALEQALEK

SEQ ID NO: 6177 - protein, 10 aa, Homo sapiens
DHSAIPVINR

SEQ ID NO: 6178 - protein, 9 aa, Homo sapiens
AKPALEDLR

SEQ ID NO: 6179 - protein, 11 aa, Homo sapiens
ATEHLSTLSEK

SEQ ID NO: 6180 - protein, 15 aa, Homo sapiens
AATVGSLAGQPLQER

SEQ ID NO: 6181 - protein, 9 aa, Homo sapiens
LGPLVEQGR

SEQ ID NO: 6182 - protein, 12 aa, Homo sapiens
LTLLAPLNSVFK

SEQ ID NO: 6183 - protein, 11 aa, Homo sapiens
SPYQLVLQHSR

SEQ ID NO: 6184 - protein, 9 aa, Homo sapiens
GEGTSAHLR

SEQ ID NO: 6185 - protein, 13 aa, Homo sapiens
GFFADYEIPNLQK

SEQ ID NO: 6186 - protein, 8 aa, Homo sapiens
INPASLDK

SEQ ID NO: 6187 - protein, 14 aa, Homo sapiens
LEVFYNGAWGTVGK

SEQ ID NO: 6188 - protein, 8 aa, Homo sapiens
TSYQVYSK

SEQ ID NO: 6189 - protein, 7 aa, Homo sapiens
EQFVEFR

SEQ ID NO: 6190 - protein, 11 aa, Homo sapiens
TFDQLTPEESK

SEQ ID NO: 6191 - protein, 8 aa, Homo sapiens
LPASFDAR

SEQ ID NO: 6192 - protein, 7 aa, Homo sapiens
TDQYWEK

SEQ ID NO: 6193 - protein, 9 aa, Homo sapiens
NVNPVALPR

SEQ ID NO: 6194 - protein, 11 aa, Homo sapiens
SSGVPPEVFTR

SEQ ID NO: 6195 - protein, 12 aa, Homo sapiens
DTGTYGFLLPER

SEQ ID NO: 6196 - protein, 8 aa, Homo sapiens
EAFAAVSK

SEQ ID NO: 6197 - protein, 9 aa, Homo sapiens
ATVNPSAPR

SEQ ID NO: 6198 - protein, 15 aa, Homo sapiens
SWLAELQQWLKPGLK

SEQ ID NO: 6199 - protein, 9 aa, Homo sapiens
FAGVFHVEK

SEQ ID NO: 6200 - protein, 12 aa, Homo sapiens
YGFIEGHVVIPR

SEQ ID NO: 6201 - protein, 8 aa, Homo sapiens
AGLQVYNK

SEQ ID NO: 6202 - protein, 18 aa, Homo sapiens
TVLLLVTPFLAAAWSLHP

SEQ ID NO: 6203 - protein, 12 aa, Homo sapiens
EEGVFTVTPDTK

SEQ ID NO: 6204 - protein, 10 aa, Homo sapiens
LSLVLVPAQK

SEQ ID NO: 6205 - protein, 9 aa, Homo sapiens
LFIPNITTK

SEQ ID NO: 6206 - protein, 9 aa, Homo sapiens
TLTLLSVTR

SEQ ID NO: 6207 - protein, 13 aa, Homo sapiens
GAYPLSIEPIGVR

SEQ ID NO: 6208 - protein, 23 aa, Homo sapiens
GPEEEHLGILGPVIWAEVGDTIR

SEQ ID NO: 6209 - protein, 16 aa, Homo sapiens
NNEGTYYSPNYNPQSR

SEQ ID NO: 6210 - protein, 10 aa, Homo sapiens
GGEIQPVSVK

SEQ ID NO: 6211 - protein, 10 aa, Homo sapiens
VLLPEYGGTK

SEQ ID NO: 6212 - protein, 6 aa, Homo sapiens
FSAYIK

SEQ ID NO: 6213 - protein, 18 aa, Homo sapiens
LAALNPESNTAGLDIFAK

SEQ ID NO: 6214 - protein, 12 aa, Homo sapiens
NSNPALNDNLEK

SEQ ID NO: 6215 - protein, 12 aa, Homo sapiens
ASSIIDELFQDR

SEQ ID NO: 6216 - protein, 10 aa, Homo sapiens
EIQNAVNGVK

SEQ ID NO: 6217 - protein, 14 aa, Homo sapiens
AHSDGGDGVVSQVK

SEQ ID NO: 6218 - protein, 9 aa, Homo sapiens
DGEYVVEVR

SEQ ID NO: 6219 - protein, 13 aa, Homo sapiens
IGDLHPQIVNLLK

SEQ ID NO: 6220 - protein, 9 aa, Homo sapiens
VAVVQYSDR

SEQ ID NO: 6221 - protein, 8 aa, Homo sapiens
WYYDPNTK

SEQ ID NO: 6222 - protein, 20 aa, Homo sapiens
EILVGDVGQTVDDPYATFVK

SEQ ID NO: 6223 - protein, 14 aa, Homo sapiens
LGGSAVISLEGKPL

SEQ ID NO: 6224 - protein, 11 aa, Homo sapiens
YALYDATYETK

SEQ ID NO: 6225 - protein, 9 aa, Homo sapiens
AVGLAGTFR

SEQ ID NO: 6226 - protein, 17 aa, Homo sapiens
TEAPSATGQASSLLGGR

SEQ ID NO: 6227 - protein, 8 aa, Homo sapiens
APLTKPLK

SEQ ID NO: 6228 - protein, 10 aa, Homo sapiens
ESDTSYVSLK

SEQ ID NO: 6229 - protein, 15 aa, Homo sapiens
YEVQGEVFTKPQLWP

SEQ ID NO: 6230 - protein, 13 aa, Homo sapiens
FNSVPLTDTGHER

SEQ ID NO: 6231 - protein, 23 aa, Homo sapiens
ISSLRPQGLSNPSTLSAQPQLSR

SEQ ID NO: 6232 - protein, 6 aa, Homo sapiens
SQLEEK

SEQ ID NO: 6233 - protein, 12 aa, Homo sapiens
SQVVAGTNYFIK

SEQ ID NO: 6234 - protein, 9 aa, Homo sapiens
YGDGIQLTR

SEQ ID NO: 6235 - protein, 14 aa, Homo sapiens
QVPGFGVADALGNR

SEQ ID NO: 6236 - protein, 10 aa, Homo sapiens
VSEALGQGTR

SEQ ID NO: 6237 - protein, 21 aa, Homo sapiens
GQIIGNFQAFDEDTGLPAHAR

SEQ ID NO: 6238 - protein, 14 aa, Homo sapiens
ILDVNDNIPVVENK

SEQ ID NO: 6239 - protein, 11 aa, Homo sapiens
IGGIGTVPVGR

SEQ ID NO: 6240 - protein, 9 aa, Homo sapiens
QTVAVGVIK

SEQ ID NO: 6241 - protein, 8 aa, Homo sapiens
FSVSPVVR

SEQ ID NO: 6242 - protein, 9 aa, Homo sapiens
GVQYLNEIK

SEQ ID NO: 6243 - protein, 7 aa, Homo sapiens
AVEHINK

SEQ ID NO: 6244 - protein, 12 aa, Homo sapiens
YISPDQLADLYK

SEQ ID NO: 6245 - protein, 6 aa, Homo sapiens
YNQLLR

SEQ ID NO: 6246 - protein, 9 aa, Homo sapiens
SGTSEFLNK

SEQ ID NO: 6247 - protein, 9 aa, Homo sapiens
SGYLLPDTK

SEQ ID NO: 6248 - protein, 13 aa, Homo sapiens
RPHFDQLVAAFDK

SEQ ID NO: 6249 - protein, 11 aa, Homo sapiens
WAAPEVIAHGK

SEQ ID NO: 6250 - protein, 12 aa, Homo sapiens
GESIEPLDPSEK

SEQ ID NO: 6251 - protein, 10 aa, Homo sapiens
LAEVPDLLEK

SEQ ID NO: 6252 - protein, 8 aa, Homo sapiens
VAQVSITK

SEQ ID NO: 6253 - protein, 11 aa, Homo sapiens
VTSGDPELPQV

SEQ ID NO: 6254 - protein, 7 aa, Homo sapiens
AVLQWTK

SEQ ID NO: 6255 - protein, 8 aa, Homo sapiens
LLESDYFR

SEQ ID NO: 6256 - protein, 7 aa, Homo sapiens
NLLQNIH

SEQ ID NO: 6257 - protein, 17 aa, Homo sapiens
VLPFFERPDFQLFTGNK

SEQ ID NO: 6258 - protein, 10 aa, Homo sapiens
AIDLFTDAIK

SEQ ID NO: 6259 - protein, 9 aa, Homo sapiens
LQKPNAAIR

SEQ ID NO: 6260 - protein, 10 aa, Homo sapiens
GINVALANGK

SEQ ID NO: 6261 - protein, 8 aa, Homo sapiens
SALDTAAR

SEQ ID NO: 6262 - protein, 8 aa, Homo sapiens
TGEVLDTK

SEQ ID NO: 6263 - protein, 7 aa, Homo sapiens
HLEEELK

SEQ ID NO: 6264 - protein, 11 aa, Homo sapiens
VFTEGEPLALR

SEQ ID NO: 6265 - protein, 16 aa, Homo sapiens
GGSTSYGTGSETESPR

SEQ ID NO: 6266 - protein, 8 aa, Homo sapiens
NSLFEYQK

SEQ ID NO: 6267 - protein, 14 aa, Homo sapiens
SYTITGLQPGTDYK

SEQ ID NO: 6268 - protein, 15 aa, Homo sapiens
VPGTSTSATLTGLTR

SEQ ID NO: 6269 - protein, 6 aa, Homo sapiens
ANYWLK

SEQ ID NO: 6270 - protein, 10 aa, Homo sapiens
DPLVIELGQK

SEQ ID NO: 6271 - protein, 17 aa, Homo sapiens
GVILYSDPADYFAPGVK

SEQ ID NO: 6272 - protein, 13 aa, Homo sapiens
LGSGNDFEVFFQR

SEQ ID NO: 6273 - protein, 13 aa, Homo sapiens
DDVALEGVSHFFR

SEQ ID NO: 6274 - protein, 15 aa, Homo sapiens
LGGPEAGLGEYLFER

SEQ ID NO: 6275 - protein, 15 aa, Homo sapiens
GALQNIIPASTGAAK

SEQ ID NO: 6276 - protein, 14 aa, Homo sapiens
LISWYDNEFGYSNR

SEQ ID NO: 6277 - protein, 15 aa, Homo sapiens
DGLLPENTFIVGYAR

SEQ ID NO: 6278 - protein, 11 aa, Homo sapiens
GGYFDEFGIIR

SEQ ID NO: 6279 - protein, 8 aa, Homo sapiens
AVLHVALR

SEQ ID NO: 6280 - protein, 17 aa, Homo sapiens
TLAQLNPESSLFIIASK

SEQ ID NO: 6281 - protein, 7 aa, Homo sapiens
DIVSGLK

SEQ ID NO: 6282 - protein, 9 aa, Homo sapiens
LNYKPPPQK

SEQ ID NO: 6283 - protein, 22 aa, Homo sapiens
AQPVQVAEGSEPDGFWEALGGK

SEQ ID NO: 6284 - protein, 8 aa, Homo sapiens
TASDFITK

SEQ ID NO: 6285 - protein, 13 aa, Homo sapiens
NLDGISHAPNAVK

SEQ ID NO: 6286 - protein, 9 aa, Homo sapiens
YYIAASYVK

SEQ ID NO: 6287 - protein, 12 aa, Homo sapiens
TWNDPSVQQDIK

SEQ ID NO: 6288 - protein, 10 aa, Homo sapiens
VYEGERPLTK

SEQ ID NO: 6289 - protein, 11 aa, Homo sapiens
IIIQESALDYR

SEQ ID NO: 6290 - protein, 8 aa, Homo sapiens
LDPALQDK

SEQ ID NO: 6291 - protein, 7 aa, Homo sapiens
LIAQDYK

SEQ ID NO: 6292 - protein, 7 aa, Homo sapiens
NDINILK

SEQ ID NO: 6293 - protein, 20 aa, Homo sapiens
ALPGQLKPFETLLSQNQGGK

SEQ ID NO: 6294 - protein, 13 aa, Homo sapiens
YISLIYTNYEAGK

SEQ ID NO: 6295 - protein, 8 aa, Homo sapiens
LPYPFSNK

SEQ ID NO: 6296 - protein, 10 aa, Homo sapiens
SVQLNGLTLK

SEQ ID NO: 6297 - protein, 9 aa, Homo sapiens
VGYVSGWGR

SEQ ID NO: 6298 - protein, 10 aa, Homo sapiens
VTSIQDWVQK

SEQ ID NO: 6299 - protein, 13 aa, Homo sapiens
SLTNDWEDHLAVK

SEQ ID NO: 6300 - protein, 9 aa, Homo sapiens
ADHGEPIGR

SEQ ID NO: 6301 - protein, 10 aa, Homo sapiens
IDIIPNPQER

SEQ ID NO: 6302 - protein, 15 aa, Homo sapiens
NPDDITQEEYGEFYK

SEQ ID NO: 6303 - protein, 9 aa, Homo sapiens
DGVVEITGK

SEQ ID NO: 6304 - protein, 8 aa, Homo sapiens
GPSWDPFR

SEQ ID NO: 6305 - protein, 11 aa, Homo sapiens
LHRPPVIVLQR

SEQ ID NO: 6306 - protein, 8 aa, Homo sapiens
LPVLLLGR

SEQ ID NO: 6307 - protein, 13 aa, Homo sapiens
VTAGISFAIPSDK

SEQ ID NO: 6308 - protein, 10 aa, Homo sapiens
FLLSESGSGK

SEQ ID NO: 6309 - protein, 11 aa, Homo sapiens
LVDEYSLNAGK

SEQ ID NO: 6310 - protein, 15 aa, Homo sapiens
SANLVAATLGAILNR

SEQ ID NO: 6311 - protein, 12 aa, Homo sapiens
FPEHELTFDPQR

SEQ ID NO: 6312 - protein, 12 aa, Homo sapiens
LPATEKPVLLSK

SEQ ID NO: 6313 - protein, 6 aa, Homo sapiens
AEVLFR

SEQ ID NO: 6314 - protein, 6 aa, Homo sapiens
ELAVFR

SEQ ID NO: 6315 - protein, 9 aa, Homo sapiens
LIQGAPTIR

SEQ ID NO: 6316 - protein, 7 aa, Homo sapiens
FHPLHSK

SEQ ID NO: 6317 - protein, 8 aa, Homo sapiens
FLNVLSPR

SEQ ID NO: 6318 - protein, 11 aa, Homo sapiens
YGQPLPGYTTK

SEQ ID NO: 6319 - protein, 14 aa, Homo sapiens
ASVSVTAEDEGTQR

SEQ ID NO: 6320 - protein, 14 aa, Homo sapiens
VELAPLPSWQPVGK

SEQ ID NO: 6321 - protein, 9 aa, Homo sapiens
IALETSLSK

SEQ ID NO: 6322 - protein, 10 aa, Homo sapiens
TFVLPVTPPR

SEQ ID NO: 6323 - protein, 14 aa, Homo sapiens
GYDVIAQAQSGTGK

SEQ ID NO: 6324 - protein, 10 aa, Homo sapiens
VLITTDLLAR

SEQ ID NO: 6325 - protein, 10 aa, Homo sapiens
EGTEASLQIR

SEQ ID NO: 6326 - protein, 10 aa, Homo sapiens
ISSLPTQLFK

SEQ ID NO: 6327 - protein, 8 aa, Homo sapiens
SDIIFFQR

SEQ ID NO: 6328 - protein, 8 aa, Homo sapiens
SVPGHDNK

SEQ ID NO: 6329 - protein, 9 aa, Homo sapiens
EATTNAPFR

SEQ ID NO: 6330 - protein, 14 aa, Homo sapiens
TYNFLPEFLVSTQK

SEQ ID NO: 6331 - protein, 7 aa, Homo sapiens
HSGIDFK

SEQ ID NO: 6332 - protein, 7 aa, Homo sapiens
QLNFLTK

SEQ ID NO: 6333 - protein, 9 aa, Homo sapiens
WQGNDIVVK

SEQ ID NO: 6334 - protein, 8 aa, Homo sapiens
AEVWLFLK

SEQ ID NO: 6335 - protein, 10 aa, Homo sapiens
EGSDLSVVER

SEQ ID NO: 6336 - protein, 13 aa, Homo sapiens
ALPGTPVASSQPR

SEQ ID NO: 6337 - protein, 16 aa, Homo sapiens
EVPLLQSLWLAHNEIR

SEQ ID NO: 6338 - protein, 10 aa, Homo sapiens
LPGLPEGAFR

SEQ ID NO: 6339 - protein, 10 aa, Homo sapiens
SLQWFGATVR

SEQ ID NO: 6340 - protein, 11 aa, Homo sapiens
SSASSGPQILK

SEQ ID NO: 6341 - protein, 7 aa, Homo sapiens
LASYLDR

SEQ ID NO: 6342 - protein, 11 aa, Homo sapiens
LQLETEIEALK

SEQ ID NO: 6343 - protein, 9 aa, Homo sapiens
VVSETNDTK

SEQ ID NO: 6344 - protein, 23 aa, Homo sapiens
FGAQLAHIQALISGIEAQLGDVR

SEQ ID NO: 6345 - protein, 8 aa, Homo sapiens
FGPGVAFR

SEQ ID NO: 6346 - protein, 10 aa, Homo sapiens
QATLTISSAR

SEQ ID NO: 6347 - protein, 9 aa, Homo sapiens
YVSELHLTR

SEQ ID NO: 6348 - protein, 12 aa, Homo sapiens
VLGSGTWPSAPK

SEQ ID NO: 6349 - protein, 13 aa, Homo sapiens
VSGWGTISSPIAR

SEQ ID NO: 6350 - protein, 8 aa, Homo sapiens
APIIAVTR

SEQ ID NO: 6351 - protein, 11 aa, Homo sapiens
LDIDSPPITAR

SEQ ID NO: 6352 - protein, 10 aa, Homo sapiens
IQGTLQPHAR

SEQ ID NO: 6353 - protein, 11 aa, Homo sapiens
SLADVDAILAR

SEQ ID NO: 6354 - protein, 23 aa, Homo sapiens
VLELSIPASAEQIQHLAGAIAER

SEQ ID NO: 6355 - protein, 8 aa, Homo sapiens
FIIPNVVK

SEQ ID NO: 6356 - protein, 9 aa, Homo sapiens
LVIITAGAR

SEQ ID NO: 6357 - protein, 8 aa, Homo sapiens
FIIPQIVK

SEQ ID NO: 6358 - protein, 9 aa, Homo sapiens
GLTSVINQK

SEQ ID NO: 6359 - protein, 8 aa, Homo sapiens
GEVAPDAK

SEQ ID NO: 6360 - protein, 8 aa, Homo sapiens
LPDGYEFK

SEQ ID NO: 6361 - protein, 8 aa, Homo sapiens
SFVLNLGK

SEQ ID NO: 6362 - protein, 12 aa, Homo sapiens
ASHEEVEGLVEK

SEQ ID NO: 6363 - protein, 6 aa, Homo sapiens
VEIFYR

SEQ ID NO: 6364 - protein, 13 aa, Homo sapiens
YSSDYFQAPSDYR

SEQ ID NO: 6365 - protein, 16 aa, Homo sapiens
TVLWPNGLSLDIPAGR

SEQ ID NO: 6366 - protein, 11 aa, Homo sapiens
VFFTDYGQIPK

SEQ ID NO: 6367 - protein, 21 aa, Homo sapiens
NIPTVNENLENYYLEVNQLEK

SEQ ID NO: 6368 - protein, 11 aa, Homo sapiens
SLEDLQLTHNK

SEQ ID NO: 6369 - protein, 11 aa, Homo sapiens
HWFQAGYSTSR

SEQ ID NO: 6370 - protein, 7 aa, Homo sapiens
TPILLIR

SEQ ID NO: 6371 - protein, 15 aa, Homo sapiens
APGELEHGLITFSTR

SEQ ID NO: 6372 - protein, 15 aa, Homo sapiens
TGVITSPDFPNPYPK

SEQ ID NO: 6373 - protein, 9 aa, Homo sapiens
LGVTANDVK

SEQ ID NO: 6374 - protein, 26 aa, Homo sapiens
VLVTGAAGQIAYSLLYSIGNGSVFGK

SEQ ID NO: 6375 - protein, 14 aa, Homo sapiens
VDFPQDQLTALTGR

SEQ ID NO: 6376 - protein, 7 aa, Homo sapiens
VSSFEEK

SEQ ID NO: 6377 - protein, 25 aa, Homo sapiens
FLLILLLQATASGALPLNSSTSLEK

SEQ ID NO: 6378 - protein, 10 aa, Homo sapiens
GIQSLYGDPK

SEQ ID NO: 6379 - protein, 8 aa, Homo sapiens
IDAVFYSK

SEQ ID NO: 6380 - protein, 12 aa, Homo sapiens
AFQVWSDVTPLR

SEQ ID NO: 6381 - protein, 19 aa, Homo sapiens
IIGYTPDLDPETVDDAFAR

SEQ ID NO: 6382 - protein, 7 aa, Homo sapiens
LSQDDIK

SEQ ID NO: 6383 - protein, 8 aa, Homo sapiens
NANSLEAK

SEQ ID NO: 6384 - protein, 15 aa, Homo sapiens
AFALWSAVTPLTFTR

SEQ ID NO: 6385 - protein, 9 aa, Homo sapiens
FQTFEGDLK

SEQ ID NO: 6386 - protein, 11 aa, Homo sapiens
SLGPALLLLQK

SEQ ID NO: 6387 - protein, 11 aa, Homo sapiens
GHQAFDVGQPR

SEQ ID NO: 6388 - protein, 11 aa, Homo sapiens
TYHSVGDSVLR

SEQ ID NO: 6389 - protein, 12 aa, Homo sapiens
VPIDGPPIDIGR

SEQ ID NO: 6390 - protein, 12 aa, Homo sapiens
AEALFDFTGNSK

SEQ ID NO: 6391 - protein, 8 aa, Homo sapiens
DAEGDLVR

SEQ ID NO: 6392 - protein, 15 aa, Homo sapiens
DIAVEEDLSSTPLLK

SEQ ID NO: 6393 - protein, 12 aa, Homo sapiens
GATGIFPLSFVK

SEQ ID NO: 6394 - protein, 10 aa, Homo sapiens
DRPFFPGLVK

SEQ ID NO: 6395 - protein, 10 aa, Homo sapiens
NIIHGSDSVK

SEQ ID NO: 6396 - protein, 15 aa, Homo sapiens
FVSDYETHGAGFSIR

SEQ ID NO: 6397 - protein, 13 aa, Homo sapiens
FVTAVGTQGAISK

SEQ ID NO: 6398 - protein, 14 aa, Homo sapiens
SFEGNNNYDTPELR

SEQ ID NO: 6399 - protein, 17 aa, Homo sapiens
AIPVAQDLNAPSDWDSR

SEQ ID NO: 6400 - protein, 19 aa, Homo sapiens
DSYETSQLDDQSAETHSHK

SEQ ID NO: 6401 - protein, 16 aa, Homo sapiens
YPDAVATWLNPDPSQK

SEQ ID NO: 6402 - protein, 11 aa, Homo sapiens
IANPVEGSTDR

SEQ ID NO: 6403 - protein, 13 aa, Homo sapiens
IITLAGPTNAIFK

SEQ ID NO: 6404 - protein, 18 aa, Homo sapiens
IAIIGAGIGGTSAAYYLR

SEQ ID NO: 6405 - protein, 9 aa, Homo sapiens
IFSQETLTK

SEQ ID NO: 6406 - protein, 8 aa, Homo sapiens
TLLETLQK

SEQ ID NO: 6407 - protein, 7 aa, Homo sapiens
SFDDLQR

SEQ ID NO: 6408 - protein, 12 aa, Homo sapiens
SHSGGELESLAR

SEQ ID NO: 6409 - protein, 11 aa, Homo sapiens
ELSDFISYLQR

SEQ ID NO: 6410 - protein, 13 aa, Homo sapiens
SEPIPESNDGPVK

SEQ ID NO: 6411 - protein, 10 aa, Homo sapiens
FDVSGYPTIK

SEQ ID NO: 6412 - protein, 11 aa, Homo sapiens
FHHTFSTEIAK

SEQ ID NO: 6413 - protein, 14 aa, Homo sapiens
SELVTVTESFSTPK

SEQ ID NO: 6414 - protein, 11 aa, Homo sapiens
STESYFIPEVR

SEQ ID NO: 6415 - protein, 12 aa, Homo sapiens
LQSLFDSPDFSK

SEQ ID NO: 6416 - protein, 10 aa, Homo sapiens
TVQAVLTVPK

SEQ ID NO: 6417 - protein, 11 aa, Homo sapiens
HGESAWNLENR

SEQ ID NO: 6418 - protein, 11 aa, Homo sapiens
DAVTTTVTGAK

SEQ ID NO: 6419 - protein, 11 aa, Homo sapiens
EVSDSLLTSSK

SEQ ID NO: 6420 - protein, 9 aa, Homo sapiens
IGNFSTDIK

SEQ ID NO: 6421 - protein, 8 aa, Homo sapiens
ISFDEFIK

SEQ ID NO: 6422 - protein, 15 aa, Homo sapiens
ELPVPIYVTQGEAQR

SEQ ID NO: 6423 - protein, 9 aa, Homo sapiens
GPVDAVTGK

SEQ ID NO: 6424 - protein, 7 aa, Homo sapiens
FWVNILK

SEQ ID NO: 6425 - protein, 16 aa, Homo sapiens
LNTIGHYEISNGSTIK

SEQ ID NO: 6426 - protein, 11 aa, Homo sapiens
GFEPGVTNILK

SEQ ID NO: 6427 - protein, 12 aa, Homo sapiens
IIDGVPVEITEK

SEQ ID NO: 6428 - protein, 18 aa, Homo sapiens
IIHGNQIATNGVVHVIDR

SEQ ID NO: 6429 - protein, 8 aa, Homo sapiens
VIFGLFGK

SEQ ID NO: 6430 - protein, 6 aa, Homo sapiens
VYFDLR

SEQ ID NO: 6431 - protein, 9 aa, Homo sapiens
IGHPAPNFK

SEQ ID NO: 6432 - protein, 11 aa, Homo sapiens
QITVNDLPVGR

SEQ ID NO: 6433 - protein, 14 aa, Homo sapiens
STGGAPTFNVTVTK

SEQ ID NO: 6434 - protein, 16 aa, Homo sapiens
TFVNITPAEVGVLVGK

SEQ ID NO: 6435 - protein, 10 aa, Homo sapiens
VDILDPALLR

SEQ ID NO: 6436 - protein, 12 aa, Homo sapiens
DPEIYTDPEVFK

SEQ ID NO: 6437 - protein, 11 aa, Homo sapiens
LLLFPFLSPQR

SEQ ID NO: 6438 - protein, 13 aa, Homo sapiens
FGSLLPIHPVTSG

SEQ ID NO: 6439 - protein, 22 aa, Homo sapiens
TGPFAEHSNQLWNISAVPSWSK

SEQ ID NO: 6440 - protein, 10 aa, Homo sapiens
VDDQIAIVFK

SEQ ID NO: 6441 - protein, 13 aa, Homo sapiens
WIDETPPVDQPSR

SEQ ID NO: 6442 - protein, 14 aa, Homo sapiens
AVSISPTNVILTWK

SEQ ID NO: 6443 - protein, 12 aa, Homo sapiens
VITEPIPVSDLR

SEQ ID NO: 6444 - protein, 7 aa, Homo sapiens
SVDIWLR

SEQ ID NO: 6445 - protein, 13 aa, Homo sapiens
VLAKPQNTAEVQK

SEQ ID NO: 6446 - protein, 17 aa, Homo sapiens
VHLPNGSPIPAVLLANK

SEQ ID NO: 6447 - protein, 11 aa, Homo sapiens
VLVIGELGVGK

SEQ ID NO: 6448 - protein, 11 aa, Homo sapiens
FNVWDTAGQEK

SEQ ID NO: 6449 - protein, 11 aa, Homo sapiens
LVLVGDGGTGK

SEQ ID NO: 6450 - protein, 7 aa, Homo sapiens
NVPNWHR

SEQ ID NO: 6451 - protein, 8 aa, Homo sapiens
EVSYGEGK

SEQ ID NO: 6452 - protein, 7 aa, Homo sapiens
VDLEGER

SEQ ID NO: 6453 - protein, 7 aa, Homo sapiens
DVDAVDK

SEQ ID NO: 6454 - protein, 15 aa, Homo sapiens
ELLQTELSGFLDAQK

SEQ ID NO: 6455 - protein, 7 aa, Homo sapiens
ELTIGSK

SEQ ID NO: 6456 - protein, 8 aa, Homo sapiens
LQDAEIAR

SEQ ID NO: 6457 - protein, 9 aa, Homo sapiens
EANYIGSDK

SEQ ID NO: 6458 - protein, 14 aa, Homo sapiens
SFFSFLGEAFDGAR

SEQ ID NO: 6459 - protein, 9 aa, Homo sapiens
LFTPEEFFR

SEQ ID NO: 6460 - protein, 7 aa, Homo sapiens
LVANLPK

SEQ ID NO: 6461 - protein, 11 aa, Homo sapiens
DYPDEVLQFAR

SEQ ID NO: 6462 - protein, 13 aa, Homo sapiens
LFLGGLDALYSLR

SEQ ID NO: 6463 - protein, 10 aa, Homo sapiens
AYEDEYSYFK

SEQ ID NO: 6464 - protein, 8 aa, Homo sapiens
TTSPPFGK

SEQ ID NO: 6465 - protein, 14 aa, Homo sapiens
GDVTAQIALQPALK

SEQ ID NO: 6466 - protein, 8 aa, Homo sapiens
NVRPDYLK

SEQ ID NO: 6467 - protein, 8 aa, Homo sapiens
WSQTAFPK

SEQ ID NO: 6468 - protein, 8 aa, Homo sapiens
YSITFTGK

SEQ ID NO: 6469 - protein, 13 aa, Homo sapiens
TELISVSEVHPSR

SEQ ID NO: 6470 - protein, 10 aa, Homo sapiens
YTYEHDPITK

SEQ ID NO: 6471 - protein, 15 aa, Homo sapiens
AVFVDLEPTVIDEVR

SEQ ID NO: 6472 - protein, 9 aa, Homo sapiens
EIIDLVLDR

SEQ ID NO: 6473 - protein, 12 aa, Homo sapiens
ISVYYNEASSHK

SEQ ID NO: 6474 - protein, 9 aa, Homo sapiens
YLTVATVFR

SEQ ID NO: 6475 - protein, 11 aa, Homo sapiens
IHPTSVISGYR

SEQ ID NO: 6476 - protein, 10 aa, Homo sapiens
SSLGPVGLDK

SEQ ID NO: 6477 - protein, 10 aa, Homo sapiens
DIDEVSSLLR

SEQ ID NO: 6478 - protein, 14 aa, Homo sapiens
NVGLDIEAEVPAVK

SEQ ID NO: 6479 - protein, 12 aa, Homo sapiens
GIDPFSLDALSK

SEQ ID NO: 6480 - protein, 9 aa, Homo sapiens
GLVLDHGAR

SEQ ID NO: 6481 - protein, 16 aa, Homo sapiens
GLEPGQEYNVLLTAEK

SEQ ID NO: 6482 - protein, 23 aa, Homo sapiens
TVSGNTVEYALTDLEPATEYTLR

SEQ ID NO: 6483 - protein, 16 aa, Homo sapiens
DAQGQPQAVPVSGDLR

SEQ ID NO: 6484 - protein, 9 aa, Homo sapiens
YEVTVVSVR

SEQ ID NO: 6485 - protein, 12 aa, Homo sapiens
GILLYGPPGTGK

SEQ ID NO: 6486 - protein, 13 aa, Homo sapiens
LDQLIYIPLPDEK

SEQ ID NO: 6487 - protein, 21 aa, Homo sapiens
GGTLSTPQTGSENDALYEYLR

SEQ ID NO: 6488 - protein, 12 aa, Homo sapiens
LDTLAQEVALLK

SEQ ID NO: 6489 - protein, 8 aa, Homo sapiens
LTVSNVLK

SEQ ID NO: 6490 - protein, 14 aa, Homo sapiens
SSGLPNIPVQTISR

SEQ ID NO: 6491 - protein, 12 aa, Homo sapiens
GFQALGDAADIR

SEQ ID NO: 6492 - protein, 9 aa, Homo sapiens
SEEFLIAGK

SEQ ID NO: 6493 - protein, 14 aa, Homo sapiens
AAPFLTYFGLFQVH

SEQ ID NO: 6494 - protein, 8 aa, Homo sapiens
INSSSPLR

SEQ ID NO: 6495 - protein, 7 aa, Homo sapiens
VVFEQTK

SEQ ID NO: 6496 - protein, 15 aa, Homo sapiens
VVLAYEPVWAIGTGK

SEQ ID NO: 6497 - protein, 11 aa, Homo sapiens
FQLFGSPSGQK

SEQ ID NO: 6498 - protein, 13 aa, Homo sapiens
LRPVAAEVYGTER

SEQ ID NO: 6499 - protein, 9 aa, Homo sapiens
VPSHAVVAR

SEQ ID NO: 6500 - protein, 9 aa, Homo sapiens
YYGYTGAFR

SEQ ID NO: 6501 - protein, 9 aa, Homo sapiens
GFLLLASLR

SEQ ID NO: 6502 - protein, 12 aa, Homo sapiens
GTSQNDPNWVVR

SEQ ID NO: 6503 - protein, 22 aa, Homo sapiens
TSESGELHGLTTEEEFVEGIYK

SEQ ID NO: 6504 - protein, 6 aa, Homo sapiens
VEIDTK

SEQ ID NO: 6505 - protein, 11 aa, Homo sapiens
ALQEALVLSDR

SEQ ID NO: 6506 - protein, 12 aa, Homo sapiens
TLVGVGASLGLR

SEQ ID NO: 6507 - protein, 9 aa, Homo sapiens
DLSQNFPTK

SEQ ID NO: 6508 - protein, 9 aa, Homo sapiens
FTILDSQGK

SEQ ID NO: 6509 - protein, 9 aa, Homo sapiens
LVEIAQVPK

SEQ ID NO: 6510 - protein, 18 aa, Homo sapiens
NENTFLDLTVQQIEHLNK

SEQ ID NO: 6511 - protein, 13 aa, Homo sapiens
LLFEGAGSNPGDK

SEQ ID NO: 6512 - protein, 10 aa, Homo sapiens
NVADYYPEYK

SEQ ID NO: 6513 - protein, 7 aa, Homo sapiens
DLEEQLR

SEQ ID NO: 6514 - protein, 31 aa, Homo sapiens; identical to SEQ ID NO: 6035

SEQ ID NO: 6515 - protein, 12 aa, Homo sapiens
FAAAHYNTEILK

SEQ ID NO: 6516 - protein, 8 aa, Homo sapiens
NQPLNPGK

SEQ ID NO: 6517 - protein, 8 aa, Homo sapiens
AVRPGYPK

SEQ ID NO: 6518 - protein, 15 aa, Homo sapiens
DVWGIEGPIDAAFTR

SEQ ID NO: 6519 - protein, 16 aa, Homo sapiens
EIPAWVPFDPAAQITK

SEQ ID NO: 6520 - protein, 10 aa, Homo sapiens
WEAEPVYVQR

SEQ ID NO: 6521 - protein, 9 aa, Homo sapiens
GFLLLASLR

SEQ ID NO: 6522 - protein, 9 aa, Homo sapiens
AVGLAGTFR

SEQ ID NO: 6523 - protein, 13 aa, Homo sapiens
ALPGTPVASSQPR

SEQ ID NO: 6524 - protein, 12 aa, Homo sapiens
LDTLAQEVALLK

SEQ ID NO: 6525 - protein, 15 aa, Homo sapiens
LGGPEAGLGEYLFER

SEQ ID NO: 6526 - protein, 12 aa, Homo sapiens
TWNDPSVQQDIK

SEQ ID NO: 6527 - protein, 8 aa, Homo sapiens
ALQASALK

SEQ ID NO: 6528 - protein, 12 aa, Homo sapiens
LTLLAPLNSVFK

SEQ ID NO: 6529 - protein, 6 aa, Homo sapiens
VEIFYR

SEQ ID NO: 6530 - protein, 16 aa, Homo sapiens
TVLWPNGLSLDIPAGR

SEQ ID NO: 6531 - protein, 8 aa, Homo sapiens
NSLFEYQK

SEQ ID NO: 6532 - protein, 11 aa, Homo sapiens
QITVNDLPVGR

SEQ ID NO: 6533 - protein, 11 aa, Homo sapiens
IIIQESALDYR

1. A multiplexed LC-SRM-MS assay for the measurement of a plurality of proteins in a single sample comprising:
a) generating a set of peptides and corresponding transitions for each protein to be monitored;
b) optimizing the collision energy for each transition such that interference among the transitions is avoided;
c) selecting a set of transitions that have the greatest peak areas for each protein, and wherein the selected transitions do not interfere with the ions in the sample;
d) monitoring the selected set of transitions for each protein in the sample, thereby measuring a plurality of proteins in the sample

2. The assay of claim 1, wherein each monitored peptide
(i) has a monoisotopic mass of 700-5000 Da; and
(ii) does not contain a cysteine or a methionine; or may contain cysteine or methionine.

3. The assay of claim 1, wherein the transitions for each peptide
(i) have one of the four most intense b or y transition ions;
(ii) has m/z values of at least 30 m/z above or below those of a precursor ion;
(iii) do not interfere with transitions from other peptides; and
(iv) represent transitions due to breakage of peptide bond at different sites of the protein.

4. The assay according to claim 1, wherein the peptides do not include any peptide that is bounded by KK, KR, RK or RR, either upstream of downstream in the corresponding protein sequence.

5. The assay according to claim 1, wherein each peptide of said set of peptides is unique to the corresponding protein.

6. The assay according to claim 1, wherein the peptides do not include peptides which were observed in post-translational modified forms.

7. The assay according to claim 1, wherein each set of peptides is prioritized according to one or more of the following ordered set of criteria:
(a) unique peptides first, then non-unique;
(b) peptides with no observed post-translational modifications first, then those observed with post-translational modifications;
(c) peptides within the mass range 800-3500 Da first, then those outside of 800-3500 Da; and
(d) sorted by decreasing number of variant residues.

8. The assay according to claim 7, wherein each set of peptides is prioritized according to all of the ordered set of criteria.

9. The assay according to any one of claim 7, wherein each prioritized set of peptides contains 1-5 peptides.

10. The assay according to claim 1 wherein the two best peptides per protein and the two best transitions per peptide are selected based on experimental data resulting from LC-SRM-MS analysis of one or more of the following experimental samples: a biological disease sample, a biological control sample, and a mixture of synthetic peptides of interest.

11. The assay according to claim 10, wherein the biological disease and biological control samples are processed using an immunodepletion method prior to LC-SRM-MS analysis.

12. The assay according to claim 11, wherein the experimental samples contain internal standard peptides.

13. The assay according to claim 11, wherein the LC-SRM-MS analysis method specifies a maximum of 7000 transitions, including transitions of the internal standard peptides and transitions.

14. The assay according to claim 1, wherein the top two transitions per peptide are selected according to one or more of the following criteria:
(1) the transitions exhibit the largest peak areas measured in either of the two biological experimental samples;
(2) the transitions are not interfered with by other ions;
(3) the transitions do not exhibit an elution profile that visually differs from those of other transitions of the same peptide;
(4) the transitions are not beyond the detection limit of both of the two biological experimental samples; and
(5) the transitions do not exhibit interferences.

15. The assay according to claim 1, wherein the top two peptides per protein are selected according to one or more of the following criteria:
(1) one or more peptides exhibit two transitions according to claim 12 and represent the largest combined peak areas of the two transitions according to claim 12; and
(2) one or more peptides exhibit one transition according to claim 12 and represent the largest combined peak areas of the two transitions according to claim 12.

16. An assay developed according to the method of claim 1.

17. A composition comprising at least two transition ions selected from the listing of transition ion in Table 2.

18. The composition of claim 17, wherein each transition ion independently corresponds to a unique protein.

19. The composition of claim 17, further comprising an additional five transition ions selected from the listing of transition ions in Table 2.

20. A composition comprising at least 2 synthetic peptides selected from the listing of peptides and proteins in Table 2.

21. The composition of claim 20, wherein each peptide independently corresponds to a unique protein.

22. The composition of any one of claim 20, wherein at least one of the peptides is isotopically labeled.

23. The composition of any claim 20, wherein the amount of each of the at least five synthetic peptides is known.

24. The composition of claim 20, further comprising one or more polar solvents.

25. The composition of claim 20, further comprising an additional five synthetic peptides selected from the listing of peptides and proteins in Table 2.

26. The composition of claim 17, wherein the five transition ions correspond to proteins selected from the group consisting of LRP1, BGH3, COIA1, TETN, TSP1, ALDOA, GRP78, ISLR, FRIL, LG3BP, PRDX1, FIBA, and GSLG1 as shown in Table 2.

27. Use of a composition of claim 20 for the development of an assay to detect a disease, disorder or condition in a mammal.

28. A method comprising analyzing the composition of claim 20 using mass spectrometry.

29. The method of claim 28, wherein the method uses selected reaction monitoring mass spectrometry.
